(19) United States
(12) Patent Application Publication
(10) Pub. No.: US 2009/0022738 A1
(43) Pub. Date: Jan. 22, 2009

(54) Multispecific deimmunized CD3-binders

(75) Inventors: Robert Hofmeister, Hingham, MA (US); Birgit Kohleisen, Munchen (DE); Ulla Lenkkeri-Schutz, Eching (DE); Christian Itin, Grafelfing (DE); Patrick Bauerle, Gauting (DE); Francis J. Carr, Gret (GB); Anita A. Hamilton, Aberdeen (GB); Stephen Williams, Alford (GB)

Correspondence Address: FOLEY AND LARDNER LLP;SUITE 500, 3000 K STREET NW, WASHINGTON, DC, 20007, US

(73) Assignee: Micromet AG

(21) Appl. No.: 10/572,740

(22) PCT Filed: Oct. 15, 2004
(86) PCT No.: PCT/EP2004/011646

§ 371 Date: Dec. 4, 2006

(30) Foreign Application Priority Data
Oct. 16, 2003 (EP) 03 02 3581.6

(51) Int. Cl. A61K 39/395; C07K 16/00; C07H 21/00; C12N 15/63; A61K 35/12; A61P 39/00; A61P 37/02; A61P 35/00; A61K 31/7052; C12N 5/00; C12P 21/00

(52) U.S. Cl. 424/173.1; 530/389.6; 536/23.53; 435/320.1; 435/325; 435/69.6; 514/44; 424/93.21

(57) ABSTRACT

The present invention provides a cytotoxically active CD3 specific binding construct comprising a first domain specifically binding to human CD3 and an Ig-derived second binding domain. Furthermore, a nucleic acid sequence encoding a CD3 specific binding construct of the invention is provided. Further aspects of the invention are vectors and host cells comprising said nucleic acid sequence, a process for the production of the construct of the invention and composition comprising said construct. The invention also provides the use of said constructs for the preparation of pharmacutical compositions for the treatment of particular diseases, a method for the treatment of particular diseases and a kit comprising the binding construct of the invention.

[0001] The present invention relates to a cytotoxically active CD3 specific binding construct comprising a first domain specifically binding to human CD3 and an Ig-derived second binding domain. Furthermore, a nucleic acid sequence encoding a CD3 specific binding construct of the invention is provided. Further aspects of the invention are vectors and host cells comprising said nucleic acid sequence, a process for the production of the construct of the invention and composition comprising said construct. The invention also provides the use of said constructs for the preparation of pharmaceutical compositions for the treatment of particular diseases, a method for the treatment of particular diseases and a kit comprising the binding construct of the invention.

[0002] Human CD3 denotes an antigen which is expressed on T cells as part of the multimolecular T cell complex and which consists of three different chains: CD3-ε, CD3-δ and CD3-γ. Clustering of CD3 on T cells, e.g, by immobilized anti-CD3 antibodies leads to T cell activation similar to the engagement of the T cell receptor but independent of its clone-typical specificity; see WO 99/54440 or Hoffman (1985) J. Immunol. 135:5-8.

[0003] Antibodies which specifically recognize CD3 antigen are described in the prior art, e.g. in Traunecker, EMBO J. 10 (1991), 3655-9 and Kipriyanov, Int. J. Cancer 77 (1998), 763-172. Lately, antibodies directed against CD3 have been proposed in the treatment of a variety of diseases. These antibodies or antibody constructs act as either, T-cell depleting agents or as mitogenic agents, as disclosed in EP 1 025 854. Human/rodent hybrid antibodies which specifically bind to the human CD3 antigen complex are disclosed in WO 00/05268 and are proposed as immunosuppressive agents, for example for the treatment of rejection episodes following the transplantation of the renal, septic and cardiac allografts. WO 03/04648 discloses a bispecific antibody directed to CD3 and to an ovarian cancer antigen. Furthermore, Kufer (1997) Cancer Immunol Immunother 45:193-7 relates to a bispecific antibody specific for CD3 and EpCAM for the therapy of minimal residual cancer.

[0004] However, prior art antibodies directed against CD3 are derived from non-human sources. This leads to several serious problems when using such anti-CD3 antibodies as part of a therapeutic regimen in humans.

[0005] One such problem is “cytokine release syndrome (CRS)”. CRS is a clinical syndrome which has been observed following the administration of the first few doses of anti-CD3 antibodies and is related to the fact that many antibodies directed against CD3 are mitogenic. In vitro, mitogenic antibodies directed against CD3 induce T cell proliferation and cytokine production. In vivo this mitogenic activity leads to the large-scale release of cytokines, including many T cell-derived cytokines, within the initial hours after the first injection of antibody. The mitogenic capacity of CD3-specific antibodies is monocyte/macrophage dependent and it involves the production of IL-6 and IL-1β by these cells.

[0006] CRS symptoms range from frequently reported mild “flu-like” symptoms to less frequently reported severe “shock-like” reactions (which may include cardiovascular and central nervous system manifestations). Symptoms include, inter alia, headache, tremor, nausea/vomiting, diarrhoea, abdominal pain, malaise and muscle/joint aches and pains, generalized weakness, cardiorespiratory events as well as neuro-psychiatric events. Severe pulmonary oedema has occurred in patients with fluid overload and in those who appeared not to have a fluid overload. Another serious problem hampering the therapeutic use of, especially, murine monoclonal antibodies is the mounting of a humoral immune response against such antibodies, resulting in the production of human anti-mouse antibodies (“HAMAs”) (Schroff (1985). Cancer Res. 45:879-885, Shawler (1985) J. Immunol. 135:1530-1535). HAMAs are typically generated during the second week of treatment with the murine antibody and neutralize the murine antibodies, thereby blocking their ability to bind to their intended target. The HAMA response can depend on the murine constant (“Fc”) antibody regions or/and the nature of the murine variable (“V”) regions.

[0007] The prior art contains various approaches to reducing or preventing the production of HAMAs by modifying monoclonal antibodies of non-human origin.

[0008] One approach to reducing the immunogenicity of such antibodies is by humanization, as for example described in WO 91/09968 and U.S. Pat. No. 6,407,213. In general, humanization entails substitutions of non-human antibody sequences for corresponding human sequences, as for example is the case with CDR-grafting.

[0009] Another approach to reducing the immunogenicity of such antibodies is by deimmunization, as for example described in WO 00/34317, WO 98/52976, WO 02/079415, WO 02/012899 and WO 02/069232. In general, deimmunization entails carrying out substitutions of amino acids within potential T cell epitopes. In this way, the likelihood that a given sequence will give rise to T cell epitopes upon intracellular protein processing is reduced. Moreover, WO 92/10755 describes an approach in which antigenic determinants on proteins are engineered. Particularly, proteins are epitope mapped and their amino acid sequence is changed through genetic engineering.

[0010] However, humanized antibodies often exhibit a decreased binding affinity with respect to their target as compared to their non-humanized parent antibodies and also often are still somewhat immunogenic in a human host.

[0011] Therefore, the technical problem of the present invention was the provision of means and methods for the treatment of and/or the amelioration of tumorous diseases, proliferative disorders as well as B-cell related diseases by induction of T cell mediated immune response. The above-mentioned means and methods should overcome the recited disadvantages of known antibody-based therapies.

[0012] The solution to said technical problem is achieved by providing the embodiments characterized in the claims.

[0013] Accordingly, the present invention relates to a cytotoxically active CD3 specific binding construct comprising a first domain specifically binding to human CD3 and an Ig-derived second binding domain,

wherein said first domain is deimmunized and comprises a CDR-H1 region, a CDR-H2 region and a CDR-H3 region, said CDR-H3 region comprising an amino acid sequence as depicted in SEQ ID NO.: 96, 108, 119, 120, 121, 122, 123, 124, 125, 126, or 127; and
wherein said first domain further comprises in its framework H1 the sequence VKK (Val-Lys-Lys) and wherein the transition sequence between framework H1 and CDR-H1 region comprises the sequence Ala-Ser-Gly-Tyr-Thr-Phe (ASGYTF; SEQ ID NO.: 233).

[0014] It was surprisingly found that the above-recited, specific modifications to known CDR regions as well as framework regions and their corresponding transition sequences lead to deimmunized, CD3 specific binding molecules which show reduced immunogenicity but retain their cytotoxic activity compared to original non-deimmunized sequences. This finding was in particular surprising since not all possible deimmunization protocols led to bioactive, functional constructs which show distinct cytotoxic activity; see appended examples. Furthermore, surprisingly the deimmunized cytotoxically active CD3 binding molecules showed increased productivity. In accordance with this invention, specific sequences of non-deimmunized antibodies have been replaced by/modified to the sequences recited herein above. In particular, in framework H1 regions the original sequence Leu-Ala-Arg (LAR) has been replaced by the sequence Val-Lys-Lys (VKK). Furthermore, the sequence Thr-Ser-Gly-Tyr-Thr-Phe (TSGYTF) comprised in the transition region of framework H1 and CDR-H1 of some non-modified/non-deimmunized CD3 specific antibodies has been modified in accordance with the invention to Ala-Ser-Gly-Tyr-Thr-Phe (ASGYTF) (SEQ ID NO.:233) (see FIG. 14). A desired, inventive CD3-specific binding construct is characterized as comprising at least two binding specificities whereby a second binding specificity is Ig-derived. Furthermore, said desired constructs are characterized by the specific amino acid sequences shown herein above. As documented in the appended examples the constructs as provided herein still retain bioactivity in their modified/deimmunized form. The examples also document that not all deimmunizations, determined by methods known in the art (WO 92/10755, WO 00/34317, WO 98/52976, WO 02/079415 or WO 02/012899), lead to bioactive molecules; see in particular the examples 2 and 5.

[0015] The term “cytotoxically active CD3 binding construct” as used herein relates to a CD3 specific construct capable of binding to human CD3 complex expressed on T cells and capable of inducing elimination/lysis of target cells. Binding of CD3 specific binders of the CD3/CD3 complex (e.g. antibodies, antibody derivatives or antibody fragments) leads to activation of T cells as known in the art; see WO 99/54440. Accordingly, an inventive construct has to be able to eliminate/lyse target cells in vivo and/or in vitro. Corresponding target cells comprise cells expressing a surface molecule, which is recognized by the second Ig-derived binding domain of the inventive constructs. Such surface molecules are characterized herein below. Cytotoxicity can be detected by methods known in the art and methods as illustrated herein below and in the appended examples. Accordingly, such methods comprise, inter alia, physiological in vitro assays. Such physiological assays may monitor cell death, for example by loss of cell membrane integrity (e.g. FACS based propidium Iodide assay, trypan Blue influx assay, photometric enzyme release assays (LDH), radiometric ⁵¹Cr release assay, fluorometric Europium release and CalceinAM release assays). Further assays comprise monitoring of cell viability, for example by photometric MTT, XTT, WST-1 and alamarBlue assays, radiometric ³H-Thd incorporation assay, clonogenic assay measuring cell division activity, and fluorometric Rhodamine¹²³ assay measuring mitochondrial transmembrane gradient. In addition, apoptosis may be monitored for example by FACS-based phosphatidylserin exposure assay, ELISA-based TUNEL test, caspase activity assay (photometric, fluorometric or ELISA-based) or analysing changed cell morphology (shrinking, membrane blebbing). It is preferred that cytotoxic activity is analysed by FACS-based measurements of release of fluorescence-based dyes. In such an assay fluorescence labelled cells, which carry a molecule which binds to the second domain of the cytotoxically active bispecific CD3 binding construct of the invention (preferably, NALM-6 cells for CD19 and Kato cells for the EpCAM antigen) are incubated with isolated PBMCs of random donors or with a standardized T-cell line in the presence of the cytotoxically active bispecific CD3 binding construct of the invention. After incubation, the release of the dye from the fluorescent target cells into the supernatant is determined by a spectrofluorimeter. A cytotoxically active deimmunized bispecific CD3 binding construct of the present invention is characterized by comparing values obtained by measuring the bioactivity of a similar construct which is not deimmunized or has no specificity to the target cells.

[0016] The term “binding to/interacting with” as used in the context with the present invention defines a binding/interaction of at least two “antigen-interaction-sites” with each other. The term “antigen-interaction-site” defines, in accordance with the present invention, a motif of a polypeptide which shows the capacity of specific interaction with a specific antigen or a specific group of antigens. Said binding/interaction is also understood to define a “specific recognition”. The term “specifically recognizing” means in accordance with this invention that the antibody molecule is capable of specifically interacting with and/or binding to at least two amino acids of each of the human target molecules as defined herein. Antibodies can recognize, interact and/or bind to different epitopes on the same target molecule. Said term relates to the specificity of the antibody molecule, i.e. to its ability to discriminate between the specific regions of the human target molecule as defined herein. The specific interaction of the antigen-interaction-site with its specific antigen may result in an initiation of a signal, e.g. due to the induction of a change of the conformation of the antigen, an oligomerization of the antigen, etc. Thus, a specific motif in the amino acid sequence of the antigen-interaction-site and the antigen bind to each other as a result of their primary, secondary or tertiary structure as well as the result of secondary modifications of said structure.

[0017] The term “specific interaction” as used in accordance with the present invention means that the CD3 specific binding construct of the invention does not or essentially does not cross-react with (poly)peptides of similar structures. Accordingly, the construct of the invention specifically binds to/interacts with human CD3 and is capable, due to its second, Ig-derived domain to interact with specific, selected other compounds, antigens, cell surface markers, tumor markers, etc. Specific examples of such molecules against which said second, Ig-derived domain is directed are given herein below.

[0018] Cross-reactivity of a panel of constructs under investigation may be tested, for example, by assessing binding of said panel of bispecific single chain constructs under conventional conditions (see, e.g., Harlow and Lane, Antibodies: A Laboratory Manual, Cold Spring Harbor Laboratory Press, 1988 and Using Antibodies: A Laboratory Manual, Cold Spring Harbor Laboratory Press, 1999) to the (poly)peptide of interest as well as to a number of more or less (structurally and/or functionally) closely related (poly)peptides. Only those constructs (i.e. antibodies, (bispecific) scFvs and the like) that bind to the (poly)peptide/protein of interest but do not or do not essentially bind to any of the other (poly)peptides which are preferably expressed by the same tissue as the (poly)peptide of interest, e.g. by the cells of the heart tissue, are considered specific for the (poly)peptide/protein of interest and selected for further studies in accordance with the method provided herein and illustrated in the appended examples. These methods may comprise, inter alia, binding studies, blocking and competition studies with structurally and/or functionally closely related molecules. These binding studies also comprise FACS analysis, surface plasmon resonance (SPR, e.g. with BIAcore®), analytical ultracentrifugation, isothermal titration calorimetry, fluorescence anisotropy, fluorescence spectroscopy or by radiolabeled ligand binding assays. Furthermore, physiological assays, like cytotoxic assays (as illustrated in the examples) and assays mentioned above may be performed. Accordingly, examples for the specific interaction of an antigen-interaction-site with a specific antigen may comprise the specificity of a ligand for its receptor. Said definition particularly comprises the interaction of ligands which induce a signal upon binding to its specific receptor. Examples for corresponding ligands comprise cytokines which interact/bind with/to its specific cytokine-receptors. Also particularly comprised by said definition is the binding of an antigen-interaction-site to antigens such as antigens of the selectin family, integrins and of the family of growth factors like EGF. Another example for said interaction, which is also particularly comprised by said definition, is the interaction of an antigenic determinant (epitope) with the antigenic binding site of an antibody.

[0019] The term “binding to/interacting with” relates not only to a linear epitope but may also relate to a conformational epitope, a structural epitope or a discontinuous epitope consisting of two regions of the human target molecules or parts thereof. In context of this invention, a conformational epitope is defined by two or more discrete amino acid sequences separated in the primary sequence which come together on the surface of the molecule when the polypeptide folds to the native protein (Sela, (1969) Science 166, 1365 and Layer, (1990) Cell 61, 553-6).

[0020] The term “discontinuous epitope” means in context of the invention non-linear epitopes that are assembled from residues from distant portions of the polypeptide chain. These residues come together on the surface when the polypeptide chain folds into a three-dimensional structure to constitute a conformational/structural epitope.

[0021] The constructs of the present invention are also envisaged to specifically bind to/interact with a conformational/structural epitope(s) composed of and/or comprising the two regions of the human CD3 complex described herein or parts thereof as disclosed herein below.

[0022] Accordingly, specificity can be determined experimentally by methods known in the art and methods as disclosed and described herein. Such methods comprise, but are not limited to Western blots, ELISA-, RIA-, ECL-, IRMA-tests and peptide scans.

[0023] The term “Ig-derived second binding domain” relates to an “immunoglobulin-derived domain”, specifically to an antibody or fragments thereof, to single chain antibodies, to synthetic antibodies, to antibody fragments, such as Fab, a F(ab₂)′, Fv or scFv fragments etc, or a chemically modified derivative of any of these. These antibodies molecules may be derived from different species or may be of chimeric origin. Most preferably (as documented herein below), said 1 g-derived second domain comprised in the CD3 specific binding construct of the invention is a scFv. Antibodies, antibody constructs, antibody fragments, antibody derivatives (all being Ig-derived) to be employed in accordance with the invention or their corresponding immunoglobulin chain(s) can be further modified using conventional techniques known in the art, for example, by using amino acid deletion(s), insertion(s), substitution(s), addition(s), and/or recombination(s) and/or any other modification(s) known in the art either alone or in combination. Methods for introducing such modifications in the DNA sequence underlying the amino acid sequence of an immunoglobulin chain are well known to the person skilled in the art; see, e.g., Sambrook (1989), loc. cit. The term “Ig-derived domain” particularly relates to (poly)peptide constructs comprising at least one CDR. Fragments or derivatives of the recited Ig-derived domains define (poly)peptides which are parts of the above antibody molecules and/or which are modified by chemical/biochemical or molecular biological methods. Corresponding methods are known in the art and described inter alia in laboratory manuals (see Sambrook et al.; Molecular Cloning: A Laboratory Manual; Cold Spring Harbor Laboratory Press, 2nd edition 1989 and 3rd edition 2001; Gerhardt et al.; Methods for General and Molecular Bacteriology; ASM Press, 1994; Lefkovits; Immunology Methods Manual: The Comprehensive Sourcebook of Techniques; Academic Press, 1997; Golemis; Protein-Protein Interactions: A Molecular Cloning Manual; Cold Spring Harbor Laboratory Press, 2002).

[0024] The term “deimmunized” as used herein relates to the above-identified first domain of the inventive CD3 binding construct, wherein said first domain is modified compared to an original wildtype construct by rendering said wildtype construct non-immunogenic or less immunogenic in humans. Wildtype constructs according to the invention relate to antibodies or parts thereof (like frameworks and/or CDRs) of non-human origin. Corresponding examples are antibodies or fragments thereof as described in U.S. Pat. No. 4,361,549 or WO 99/54440. The term “deimmunized” also relates to constructs, which show reduced propensity to generate T cell epitopes. In accordance with this invention, the term “reduced propensity to generate T cell epitopes” relates to the removal of T-cell epitopes leading to specific T-cell activation. Furthermore, reduced propensity to generate T cell epitopes means substitution of amino acids contributing to the formation of T cell epitopes, i.e. substitution of amino acids, which are essential for formation of a T cell epitope. In other words, reduced propensity to generate T cell epitopes relates to reduced immunogenicity or reduced capacity to induce antigen independent T cell proliferation. In addition, reduced propensity to generate T cell epitopes relates to deimmunisation, which means loss or reduction of potential T cell epitopes of amino acid sequences inducing antigen independent T cell proliferation. According to the invention, a CD3 binding region, which has reduced propensity to generate T cell epitopes is less or preferably non immunogenic compared to non-deimmunized molecule but which has still retained its capacity to binding to Cb3, i,e. a low or non immunogenic antibody construct binding to CD3.

[0025] The term “T cell epitope” relates to short peptide sequences which can be released during the degradation of peptides, polypeptides or proteins within cells and subsequently be presented by molecules of the major histocompatibility complex (MHC) in order to trigger the activation of T cells; see inter alia WO 02/066514. For peptides presented by MHC class II such activation of T cells can then give rise to an antibody response by direct stimulation of T cells to produce said antibodies.

[0026] Accordingly, a deimmunized first domain specifically binding to a human CD3 comprises at least the above mentioned CDR-H3 located between framework H3 and H4, wherein said first binding domain shows a reduced propensity to generate T-cell epitopes compared to a non-deimmunized first domain comprising the unchanged wildtype (wt)-CDR-H3 located between framework H3 and H4. Furthermore, said deimmunized first domain comprises at least in the transition region of the framework H1 and CDR-H1 the above mentioned sequence motif which provides a reduced propensity to generate T-cell epitopes compared to a non-deimmunized first domain comprising the unchanged wt-H1 transition region of the framework H1 and CDR-H1. “Reduced propensity to generate T-cell epitopes” and/or “deimmunization” may be measured by techniques known in the art. Preferably, deimmunization of proteins may be tested in vitro by a T cell proliferation assay. In this assay PBMCs from donors representing >80% of HLA-DR alleles in the world are screened for proliferation in response to either wildtype or deimmunized peptides. Ideally cell proliferation is only detected upon loading of the antigen-presentirig cells with wildtype peptides. Alternatively, one may test deimmunization by expressing HLA-DR tetramers representing all haplotypes. These tetramers may be tested for peptide binding or loaded with peptides substitute for antigen-presenting cells in proliferation assays. In order to test if deimmunized peptides are presented on HLA-DR haplotypes, binding of e.g. fluorescence-labeled peptides on PBMCs can be measured. Furthermore, deimmunization can be proven by determining whether antibodies against the deimmunized molecules have been formed after administration in patients. A particular preferred method is a T-cell proliferation assay as, inter alia, shown in appended example 6.

[0027] Preferably, antibody derived molecules are deimmunized in the framework regions and most of the CDR regions are not modified in order to generate reduced propensity to induce T cell epitope so that the binding affinity of the CDR regions is not affected. Even elimination of one T cell epitope results in reduced immunogenicity. Preferably, the molecule is deimmunized in the CDR2 region of the VL chain, more preferably in the CDR2 region of the VH chain, even more preferably in the CDR1 region of the VL chain, even more preferably in the CDR1 region of the VH chain, more preferably in the framework region (FR) of the VL chain and most preferably in the framework region (FR) of the VH chain.

[0028] The term “CDR” as employed herein relates to “complementary determining region”, which is well known in the art. The CDRs are parts of immunoglobulins and T cell receptors that determine the specificity of said molecules and make contact with specific ligand. The CDRs are the most variable part of the molecule and contribute to the diversity of these molecules. There are three CDR regions CDR1, CDR2 and CDR3 in each V domain. CDR-H depicts a CDR region of a variable heavy chain and CDR-L relates to a CDR region of a variable light chain. H means the variable heavy chain and L means the variable light chain. The CDR regions of an Ig-derived region may be determined as described in Kabat (1991). Sequences of Proteins of Immunological Interest, 5th edit., NIH Publication no. 91-3242 U.S. Department of Health and Human Services, Chothia (1987). J. Mol. Biol. 196, 901-917 and Chothia (1989) Nature, 342, 877-883.

[0029] In general CDR-L1 consists of 10-17 amino acid residues, starts approximately at amino acid residue 24 of the full VL region of an Ig-derived sequence and the residue Cys precedes the CDR-L1. Preferably, the residue Trp follows CDR-L1. CDR-L2 starts preferably, 16 amino acid residues after CDR-L1 and consists preferably of 7 residues. Preferably, the amino acid residues Ile-Tyr, but also, Val-Tyr, Ile-Lys, IIe-Phe precede CDR-L2. CDR-L3 starts, preferably, 33 amino acid residues after CDR-L2 L2 and consists, preferably, of 7-11 residues. CDR-L3 follows, preferably, the residue Cys and, preferably, the residues Phe-Gly-Xaa-Gly follow directly CDR-L3. CDR-H1 consists of, preferably, 10-12 residues and starts, preferably, approximately at residue 26 from the beginning of the VH region. Preferably, the residue Trp follows CDR-H1. CDR-H2 starts, preferably, 15 amino acid residues after the end of CDR-H1 and consists, preferably, of 16 to 19 residues. Preferably, residues Lys/Arg-Leu/lleNal/Phe/Thr/Ala-Thr/Ser/IIe/Ala follow CDR-H2. CDR-H3 starts 33 amino acid residues after CDR-H2 and has a length of 3-25 amino acid residues. CDR-H3 follows the sequence Cys-Xaa-Xaa (preferably Cys-Ala-Arg) and the residues Trp-Gly-Xaa-Gly follow CDR-H3. The structure of CDR regions has been described in http://www.bioinf.org.uk/abs/.

[0030] The above recited CDR-H1 and CDR-H2 regions are derived from antibody molecules which are capable of specifically binding to/interacting with human CD3. Such CD3 specific antibody are known in the art and comprise in particular the monoclonal antibodies OKT-3, TR-66 or X35-3, VIT3, BMA030 (BW264/56), CLB-T3/3, CRIS7, YTH12.5, F111-409, CLB-T3.4.2, TR-66, WT32, SPv-T3b, 11D8, XIII-141, XIII-46, XIII-87, 12F6, T3/RW2-8C8, T3/RW24B6, OKT3D, M-T301, SMC2, F101.01, UCHT-1 or WT-31. All the mentioned anti-CD3 antibodies are human specific and in accordance with this invention it is possible to combine various CDR regions, in particular CDRH regions of the antibodies.

[0031] In a more preferred embodiment, said CDR-H1 and CDR-H2 regions of said CD3 specific domain with reduced propensity to generate T cell epitopes are derived from the antibody construct described in WO 99/54440. Even more preferred (and as illustrated in the appended examples) said CDR-H1 and CDR-H2 regions, as well as the CDR-H3 region, are derived from an antibody/antibody derivative with specificity for the CD3 molecule described by Traunecker (1991), EMBO J. 10, 3655-3659. In accordance with this invention, said CDR-HL, CDR-H2 and CDR-H3 regions are derived from antibodies/antibody derivatives and the like which are capable of specifically recognizing the human CD3-ε chain in the context of other TCR subunits, e.g. in mouse cells transgenic for human CD3-ε chain. These transgenic mouse cells express human CD3-ε chain in a native or near native conformation.

[0032] In accordance with this invention, a framework region relates to a region in the V domain (VH or VL domain) of immunoglobulins and T-cell receptors that provides a protein scaffold for the hypervariable complementarity determining regions (CDRs) that make contact with the antigen. In each V domain, there are four framework regions designated FR1, FR2, FR3 and FR4. Framework 1 encompasses the region from the N-terminus of the V domain until the beginning of CDR1, framework 2 relates to the region between CDR1 and CDR2, framework 3 encompasses the region between CDR2 and CDR3 and framework 4 means the region from the end of CDR3 until the C-terminus of the V domain; see, inter alia, Janeway, Immunobiology, Garland Publishing, 2001, 5th ed. Thus, the framework regions encompass all the regions outside the CDR regions in VH or VL domains. Furthermore, the term “transition sequence between a framework and a CDR region” relates to a direct junction between the framework and CDR region. In particular, the term “transition sequence between a framework and a CDR region” means the sequence directly located N- and C-terminally of the CDR regions or amino acids surrounding CDR regions. Accordingly, frameworks may also comprise sequences between different CDR regions. The person skilled in the art is readily in a position to deduce from a given sequence the framework regions, the CDRs as well as the corresponding transition sequences; see Kabat (1991) Sequences of Proteins of Immunological Interest, 5th edit., NIH Publication no. 91-3242 U.S. Department of Health and Human Services, Chothia (1987). J. Mol. Biol. 196, 901-917 and Chothia (1989) Nature, 342, 877-883.

[0033] A preferred cytotoxically active CD3 specific binding construct of the invention further comprises in said first domain a framework H3 comprising the sequence Met-Glu-Leu-Ser (MELS; SEQ ID NO.:234). Even more preferred is an inventive construct which comprises in said first domain a framework H3 comprising the sequence IIe-Thr-Thr-Asp-Lys (ITTDK; SEQ ID NO.: 235).

[0034] In accordance with the present invention, the first domain of the inventive construct specifically binding to/interacting with human CD3 and having a reduced propensity to generate T cell epitopes, comprises a CDR-H1, CDR-H2 and CDR-H3 regions as defined herein and, in a preferred embodiment, VH-frameworks (frameworks 1, 2, 3, 4) as defined above, in particular as shown in any one of SEQ ID NOs.: 152 or 153, 156 or 157, 160 or 161 and/or 164 or 165. Therefore, the CD3 specific binding construct of the invention comprises a first domain which specifically binds to human CD3 and comprises a framework region 1 as shown in SEQ ID NO.: 152 or 153, a framework region 2 as shown in SEQ ID NO.: 156 or 157, a framework region 3 as shown in SEQ ID NO.: 160 or 161 and/or a framework region 4 as shown in SEQ ID NO.: 164 or 165.

[0035] In a particularly preferred embodiment of the invention, the cytotoxically active deimmunized CD3 specific binding construct comprises in its first domain (a) a CDR-H1 as depicted in SEQ ID NO.: 88; and (b) a CDR-H2 as depicted in SEQ ID NO.: 90 or 92.

[0036] Accordingly, the modified CDR-H1 and CDR-H2 regions lead to a reduced propensity to generate T cell epitopes and are derived from an CD3-ε chain specific antibody. Most preferably in accordance with this invention said (parental) antibodies should be capable of specifically binding epitopes reflecting the native or near native structure or a conformational epitope of human CD3 presented in context of the TCR complex.

[0037] Preferably, the CD3 specific binding construct of the invention comprises a VH-region as depicted in SEQ ID NO.:74 or 76. SEQ ID NO.:74 shows an illustrative deimmunized variable heavy region and, similarly, SEQ ID NO.:76 shows an illustrative deimmunized variable heavy region.

[0038] Preferably, the inventive CD3 specific binding construct comprises a CDR-L1 as depicted in SEQ ID NO.: 98 or 100, a CDR-L2 as depicted in SEQ ID NO.:102 and/or a CDR-L3 as depicted in SEQ ID NO.:104.

[0039] The CD3 specific binding construct of the invention comprises, in a preferred embodiment, a VL region in its CD3-specific portion, wherein said VL region is selected from the group consisting of SEQ ID NO.: 78, SEQ ID NO.: 80, SEQ ID NO.: 82 and SEQ ID NO.: 112. VL1 as characterized in SEQ ID NO.:78, VL2 as characterized in SEQ ID NO.:80 and VL 3 as characterized in SEQ ID NO.:82 relate to full deimmunized VL regions in accordance with this invention, and they may be used in various combinations with the above described VH regions. Yet, it is also envisaged that the non-deimmunized VL region may be combined, in accordance with the invention, with deimmunized VH regions defined above. A corresponding non-deimmunized VL-region preferably employed in an cytotoxically active CD3 binding construct of the invention, is shown in SEQ ID NO.: 112. Accordingly, not only heavy chain part of the above recited “first domain” of the inventive CD3 construct may be modified to have a reduced propensity to generate T cell epitopes. It is also envisaged that said domain comprises the corresponding variable light chain parts. SEQ ID NOs.: 78, 80, and 82, for example, depict deimmunized VL1, VL2 and VL3 regions of the CD3 binding part of a construct disclosed in Wo 99/54440.

[0040] As mentioned above, the CD3 specific binding construct of the invention, most preferably, comprises an Ig-derived second domain which is a scFv. Accordingly, in a most preferred embodiment of the present invention, a deimmunized, bispecific single chain antibody construct is provided with one specificity for human CD3 and a further specificity which is mediated by a second scFv, directed against/capable of interacting with a further molecule/compound. These further molecules/compounds may comprise cell surface molecules, tumor markers, tumor antigens and the like. Such further compounds/molecules are exemplified herein below and specific constructs are also given and provided in the appended examples.

[0041] The term “bispecific single chain antibody construct” relates to a construct comprising two antibody derived binding domains, preferably scFvs. One of said binding domains consists of variable regions (or parts thereof of an antibody, antibody fragment or derivate thereof, capable of specifically binding to/interacting with human CD 3 antigen (target molecule 1). The second binding domain consists of variable regions (or parts thereof of an antibody, antibody fragment or derivative thereof, capable of specifically binding to/interacting with another (human) antigen (target molecule 2) as defined below. Accordingly, said second binding domain is, in accordance with this invention, the Ig-derived second domain recited above which comprises an antigen-interaction-site with specificity for a cell surface molecule and/or a tumor specific marker. Said two domains/regions in the bispecific construct, preferably said bispecific single chain antibody construct, are preferably covalently connected to one another as a single chain. This connection can be effected either directly (domain 1 [specific for human CD3 antigen, comprising a reduced propensity to generate T cell epitopes and comprising CDR-regions or CDR-regions and framework regions as defined above]—domain 2 [specific for a cell surface molecule and/or a tumor specific marker] or domain 1 [specific for a cell surface molecule and/or a tumor specific marker]—domain 2 [specific for human CD3 antigen, comprising a reduced propensity to generate T cell epitopes and comprising CDR-regions or CDR-regions and framework regions as defined above]) or through an additional polypeptide linker sequence (domain1—linker sequence—domain2). In the event that a linker is used, this linker is preferably of a length and sequence sufficient to ensure that each of the first and second domains can, independently from one another, retain their differential binding specificities. As mentioned above and as documented in the appended examples, preferably, the CD3 specific binding construct comprising at least two domains as defined herein is a “bispecific single chain antibody construct”, most preferably a bispecific single chain Fv (scFv). It is in particular envisaged that said construct is employed in context of a pharmaceutical composition. Bispecific single chain molecules are known in the art and are described in WO 99/54440, Mack, J. Immunol. (1997), 158, 3965-3970, Mack, PNAS, (1995), 92, 7021-7025, Kufer, Cancer Immunol. Immunother., (1997), 45, 193-197, Löffler, Blood, (2000), 95, 6, 2098-2103, Brühl, J. Immunol., (2001), 166, 2420-2426. A particularly preferred molecular format of the invention provides a polypeptide construct wherein the CD3 specific binding domain of the construct of the invention comprises at least one V_{H} and one V_{L} region as defined above. It is of note that in addition to a V_{H}-region as defined herein and having reduced propensity to generate T cell epitopes, said specific binding construct may comprise additional regions/domains with reduced propensity to generate T cell epitopes. As mentioned above, also the VL-region and/or the corresponding frameworks may comprise amino acid stretches which have been engineered in accordance with this invention to having reduced propensity for T cell epitope generation. The intramolecular orientation of the V_{H}-domain and the V_{L}-domain, which are linked to each other by a linker-domain, in the scFv format is not decisive for the recited bispecific single chain constructs. Thus, scFvs with both possible arrangements (V_{H}-domain-linker domain-V_{L}-domain; V_{L}-domain-linker domain-V_{H}-domain) are particular embodiments of the recited bispecific single chain construct. A CD3 specific domain can be located N- or C-terminally in the bispecific molecule. VH and VL regions of each domain can be arranged in different orders (V_{H}-V_{L} or V_{L}-V_{H}).

[0042] The term “single-chain” as used in accordance with the present invention means that said first and second domain of the bispecific single chain construct are covalently linked, preferably in the form of a co-linear amino acid sequence encoded by a single nucleic acid molecule.

[0043] It is of note that the construct of the invention may comprise, in addition to the herein defined first domain and the Ig-derived second domain (an) additional domain(s), e.g. for the isolation and/or preparation of recombinantly produced constructs.

[0044] It is of note that, in accordance with this invention, not only the above described first domain which specifically binds to human CD3 of the inventive CD3 construct may have reduced propensity to generate T cell epitopes. It is also envisaged that the Ig-derived second domain and/or (a) connecting, linker-region(s) is (are) modified, for example humanized and/or also deimmunized.

[0045] As mentioned above, deimmunization approaches are in particular illustrated in WO 00/34317, WO 98/52976, WO 02/079415 or WO 02/012899 and the appended examples. These approaches entail carrying out substitutions of amino acids within potential T cell epitopes. In this way, the likelihood that a given sequence will give rise to T cell epitopes upon intracellular protein processing is reduced. In addition, WO 92/10755 describes an approach in which antigenic determinants on proteins are engineered. Particularly, proteins are epitope mapped and their amino acid sequence is changed through genetic engineering.

[0046] Furthermore, “humanization approaches” are well known in the art and in particular described for antibody molecules, e.g. Ig-derived molecules. The term “humanized” refers to humanized forms of non-human (e.g., murine) antibodies or fragments thereof (such as Fv, Fab, Fab′, F(ab′), scFvs, or other antigen-binding partial sequences of antibodies) which contain some portion of the sequence derived from non-human antibody. Humanized antibodies include human immunoglobulins in which residues from a complementary determining region (CDR) of the human immunoglobulin are replaced by residues from a CDR of a non-human species such as mouse, rat or rabbit having the desired binding specificity, affinity and capacity. In general, the humanized antibody will comprise substantially all of at least one, and generally two, variable domains, in which all or substantially all of the CDR regions correspond to those of a non-human immunoglobulin and all or substantially all of the FR regions are those of a human immunoglobulin consensus sequence. The humanized antibody optimally also will comprise at least a portion of an immunoglobulin constant region (Fc), typically that of a human immunoglobulin; see, inter alia, Jones et al., Nature 321:522-525 (1986), Presta, Curr. Op. Struct. Biol. 2:593-596 (1992). Methods for humanizing non-human antibodies are well known in the art. Generally, a humanized antibody has one or more amino acids introduced into it from a source which is non-human in order to more closely resemble a human antibody, while still retaining the original binding activity of the antibody. Methods for humanization of antibodies/antibody molecules are further detailed in Jones et al., Nature 321:522-525 (1986); Riechmann et al., Nature 332:323-327 (1988); and Verhoeyen et al., Science 239:1534-1536 (1988). Specific examples of humanized antibodies, e.g. antibodies directed against EpCAM, are known in the art, see e.g. (LoBuglio, Proceedings of the American Society of Clinical Oncology (Abstract). 1997, 1562 and Khor, Proceedings of the American Society of Clinical Oncology (Abstract), 1997, 847).

[0047] Accordingly, in the context of this invention, in particular bispecific single chain antibody constructs are provided, which are deimmunized and can successfully be employed in pharmaceutical compositions.

[0048] As mentioned above, the Ig-derived second domain of the above-described CD3 specific binding construct may comprise an antigen-interaction-site with specificity for a cell surface molecule.

[0049] The term “cell surface molecule”, as used herein, also denotes molecules which are presented on the surface of cells. The term “cell surface molecule”, relates to molecules, which are presented on the surface of cells and comprise domains or epitopes accessible (in vitro or in vivo) to Ig-derived binding domains, preferably antibodies, antibody fragments or derivatives. As illustrated above, most preferably said Ig-derived domain is a scFv. Examples for said cell surface molecules are membrane and transmembrane proteins, molecules adapted to said proteins or the cell surface etc. According to a further preferred embodiment of the invention said cell surface molecule is a tumor specific marker. In context of this invention, the term “tumor specific marker” relate to molecules, which are presented and/or located on the surface of tumor cells or which are ubiquitously expressed but are only accessible for binding of antibodies, antibody fragments or antibody derivatives on the surface of tumor cells. Examples of tumor markers are given herein below and comprise, but are not limited to, EpCAM, CD19, HER-2, HER-2 neu, HER-3, HER4, EGFR, PSMA, CEA, MUC-1 (mucin), MUC2, MUC3, MUC4, MUC5_{AC}, MUC5_{B}, MUC7, Lewis-Y, CD20, CD33, CD30, CD44v6, Wue-1, Plasma Cell Antigen (see WO 01/47953), (membrane-bound) IgE, Melanoma Chondroitin Sulfate Proteoglycan (MCSP), STEAP, mesothelin, Prostate Stem Cell Antigen (PSCA), sTn (sialylated Tn antigen), FAP (fibroblast activation antigen), EGFRvIII, Igα, Igβ, MT-MMPs, Cora antigen, EphA2, L6 and CO-29.

[0050] The Ig-derived second domain of the CD3 specific binding construct of the invention may also comprise an antigen-interaction site with a specificity for a molecule selected from the group consisting of EpCAM, CCR5, CD19, HER-2, HER-2 neu, HER-3, HER-4, EGFR, PSMA, CEA, MUC-1 (mucin), MUC2, MUC3, MUC4, MUC5_{AC}, MUC5_{B}, MUC7, βhCG, Lewis-Y, CD20, CD33, CD30, ganglioside GD3, 9-O-Acetyl-GD3, GM2, Globo H, fucosyl GM1, Poly SA, GD2, Carboanhydrase IX (MN/CA IX), CD44v6, Sonic Hedgehog (Shh), Wue-1, Plasma Cell Antigen, (membrane-bound) IgE, Melanoma Chondroitin Sulfate Proteoglycan (MCSP), CCR8, TNF-alpha precursor, STEAP, mesothelin, A33 Antigen, Prostate Stem Cell Antigen (PSCA), Ly-6; desmoglein 4, E-cadherin neoepitope, Fetal Acetylcholine Receptor, CD25, CA19-9 marker, CA-125 marker and Muellerian Inhibitory Substance (MIS) Receptor type II, sTn (sialylated Tn antigen), FAP (fibroblast activation antigen), endosialin, EGFRvIII, L6, SAS, CD63, TAG72, TF-antigen, Cora antigen, CD7, CD22, Igα (CD79a), Igβ (CD79b), G250, gp100, MT-MMPs, F19-antigen, CO-29 and EphA2.

[0051] The constructs provided herein are particular useful in medical setting. For example, tumorous diseases and/or lymphomas, preferably non-Hodgkin's B-cell lymphoma, may be treated with an inventive deimmunized (bispecific) construct directed against human CD3 and CD20 (CD3×CD20 or CD20×CD3). Autoimmune diseases may be treated by the administration of deimmunized (bispecific) constructs directed against human CD3 and CD30 or CD19 (i.e CD3×CD30 or CD30×CD3 or CD3×CD19 or CD19×CD3). Rheumatoid arthritis, as well as other inflammatory diseases may be treated with an inventive deimmunized (bispecific) construct directed against human CD3 and CCR5 (CD3×CCR5 or CCR5×CD3). A deimmunized CD3 specific binding construct as defined herein and comprising a second Ig-derived domain directed to/binding with TNF-alpha precursor may also be useful in the treatment or prevention of inflammatory disorders. CD3 constructs as provided herein and comprising a second, Ig-derived domain directed against/binding to/interacting with EpCAM, CD19, HER-2, HER-2 neu, HER-3, HER-4, EGFR, PSMA, CEA, MUC-1 (mucin), MUC2, MUC3, MUC4, MUC5_{AC}, MUC5_{B}, MUC7, Lewis-Y, CD20, CD33, CD30, CD44v6, Wue-1, Plasma Cell Antigen (see WO 01/47953), (membrane-bound) IgE, Melanoma Chondroitin Sulfate Proteoglycan (MCSP), STEAP, mesothelin, Prostate Stem Cell Antigen (PSCA), sTn (sialylated Tn antigen), FAP (fibroblast activation antigen), EGFRvIII, Igα, Igβ, MT-MMPs, Cora antigen, EphA2, L6 and CO-29 may be particularly useful in the medical intervention of tumorous diseases like breast cancer, colon cancer, prostate cancer, head and neck cancer, skin cancer (melanoma), cancers of the genito-urinary tract, e.g. ovarial cancer, endometrial cancer, cervix cancer and kidney cancer, lung cancer, gastric cancer, cancer of the small intestine, liver cancer, pancreas cancer, gall bladder cancer, cancers of the bile duct, esophagus cancer, cancer of the salivatory glands and cancer of the thyroid gland or other tumorous diseases like hematological tumors, gliomas, sarcomas or osteosarcomas. The administration of the CD3 binding constructs is also indicated for minimal residual disease, preferably for early solid tumors, advanced solid tumors or metastatic solid tumors.

[0052] As also illustrated in the appended examples, a particularly preferred CD3 specific binding construct of the invention comprises the above defined first domain with reduced propensity to generate T cell epitopes and a second, Ig-derived domain comprising an antigen-interaction site with a specificity for EpCAM.

[0053] Epithelial cell adhesion molecule (EpCAM, also called 17-1A antigen, KSA, EGP40, GA733-2, ks1-4 or esa) is a 40-kDa membrane-integrated glycoprotein of 314 amino acids with specific expression in certain epithelia and on many human carcinomas (reviewed in Balzar, J. Mol. Med. 1999, 77, 699-712). EpCAM was discovered and subsequently cloned through its recognition by the murine monoclonal antibody 17-1A/edrecolomab (Goettlinger, Int J Cancer. 1986; 38, 47-53 and Simon, Proc. Natl. Acad. Sci. USA. 1990; 87, 2755-2759). EpCAM serves to adhere epithelial cells in an oriented and highly ordered fashion (Litvinov, J Cell Biol. 1997, 139, 1337-1348). Upon malignant transformation of epithelial cells the rapidly growing tumor cells are abandoning the high cellular order of epithelia. Consequently, the surface distribution of EpCAM becomes less restricted and the molecule better exposed on tumor cells and accessible for binding of antibodies, antibody fragments or antibody derivatives on the surface of tumor cells. Due to their epithelial cell origin, tumor cells from most carcinomas still express EpCAM on their surface.

[0054] In vivo, expression of EpCAM is related to increased epithelial proliferation and negatively correlates with cell differentiation (for review see Balzar, 1999, J. Mol. Med. 77, 699-712). Expression of EpCAM is essentially seen with all major carcinomas (reviewed in Balzar, J Mol. Med. 1999, 77, 699-712 or documented, inter alia, in De Bree, Nucl Med. Commun. 1994, 15, 613-27; Zhang, Clin Cancer Res. 1998, 4, 295-302). Because of its widespread expression, EpCAM is referred to as a “pan-carcinoma” antigen. In many cases, tumor cells were observed to express EpCAM to a much higher degree than their parental epithelium or less aggressive forms of said cancers. For example, increased EpCAM expression represents an early event in the development of prostate cancer (Poczatek, J Urol., 1999, 162, 1462-1644). In addition, in the majority of both squamous and adenocarcinomas of the cervix a strong EpCAM expression correlates with an increased proliferation and the disappearance of markers for terminal differentiation (Litvinov, Am. J. Pathol. 1996, 148, 865-75). In breast cancer, overexpression of EpCAM on tumor cells is a predictor of survival (Gastl, Lancet. 2000, 356, 1981-1982). EpCAM is a marker for the detection of disseminated tumor cells in patients suffering from squamous cell carcinoma of the head, neck and lung (Chaubal, Anticancer Res 1999, 19, 2237-2242, Piyathilake, Hum Pathol. 2000, 31, 482-487). Normal squamous epithelium, as found in epidermis, oral cavity, epiglottis, pharynx, larynx and esophagus did not significantly express EpCAM (Quak, Hybridoma, 1990, 9, 377-387). EpCAM has been shown to be expressed on the majority of primary, metastatic, and disseminated NSCLC (non small cell lung cancer cells (Passlick, Int J Cancer, 2000, 87, 548-552)), on gastric and gastro-oesophageal junction adenocarcinomas (Martin, J Clin Pathol 1999, 52, 7014) and in cell lines derived from colorectal, pancreatic carcinomas and breast carcinomas (Szala, Proc Natl Acad Sci USA 1990, 87, 3542-6, Packeisen, Hybridoma, 1999, 18, 37-40).

[0055] In a most preferred embodiment, the CD3 specific binding construct of the invention which comprises a second Ig-derived domain directed against/binding to EpCAM, comprises an amino acid sequence selected from the group of
[0056] (a) an amino acid sequence as shown in any one of SEQ ID NO.: 31, 33, 35, 37, 39, 49, 55, 58, 61, 63, 65, 67, 237, 239, 241, 243, 245, 247, 249, 251, 253, 255, 257, 259, 261, 263, 265, 267, 269, 271, 273, 275, 277, 279, 281, 283, 285, 287, 289, 291, 293, 295, 297, 299, 301, 303, 305, 307, 309, 311, 313, 315, 317, 319, 321, 323 and 325;
[0057] (b) an amino acid sequence encoded by a nucleic acid sequence as shown in any one of SEQ ID NO.: 30, 32, 34, 36, 38, 48, 54, 57, 60, 62, 64, 66, 236, 238, 240, 242, 244, 246, 248, 250, 252, 254, 256, 258, 260, 262, 264, 266, 268, 270, 272, 274, 276, 278, 280, 282, 284, 286, 288, 290, 292, 294, 296, 298, 300, 302, 304, 306, 308, 310, 312, 314, 316, 318, 320, 322 and 324; and
[0058] (c) an amino acid sequence encoded by a nucleic acid sequence which is degenerate as a result of the genetic code to a nucleotide sequence of (b).

[0059] Accordingly, the present invention provides, in a particularly preferred embodiment for specific CD3 constructs which comprise a CD3 binding/interaction part (“anti-CD3”) which has reduced propensity to generate T cell epitopes and a further single chain part (an Ig-derived domain) which specifically interacts with/binds to EpCAM (“anti-EpCAM”). The following tables 1A, 1B, 2A, 2B, 3A, 3B, 4A, 4B, 5A and 5B relate to preferred configurations of such CD3 and EpCAM binding constructs. EpCAM 3-1, EpCAM 3-5, EpCAM 4-1, EpCAM 4-7 and EpCAM 5-10 relate to specific single chain antibodies against EpCAM isolated by phage display in WO99/25818.

[0060] Each protein construct in Tables 1A, 2A, 3A, 4A and 5A comprises 7 distinct protein modules, denoted A-G. Protein modules A-G are directly and covalently linked to one another in a single contiguous polypeptide chain by peptide bonds in the order A-B-C-D-E-F-G, with protein module A at the N-terminus and protein module G at the C-terminus. Protein modules A, C, E and G denote antibody variable domains which can be either VH or VL domains of antibodies having specificity for the human CD3 or EpCAM antigen. The modules B, D and F are linkers connecting the VH and VL domains.

[0061] If protein module A is a VH antibody domain, then protein module C is a VL protein domain, and vice versa. If protein module E is a VH antibody domain, then protein module G is a VL protein domain, and vice versa.

[0062] Deimmunized VH domains of antibodies having specificity for the human CD3 antigen can be selected from the sequences as set out in SEQ ID NOs.: 74 or 76.

[0063] Deimmunized VL domains of antibodies having specificity for the human CD3 antigen can be selected from the sequences as set out in SEQ ID NOs.: 78, 80 or 82. The VH protein domain of human EpCAM 3-1, 3-5, 4-1, 4-7 and 5-10 antibody is as set out in SEQ ID NO.: 137, 141, 145, 149 and 133, respectively. The VL protein domain of human EpCAM 3-1, 3-5, 4-1, 4-7 and 5-10 antibody is as set out in SEQ ID NO.: 139, 143, 147, 151 and 135, respectively.

[0064] Pairs of antibody variable domains denoted by the protein module pairs A/C and E/G are joined by additional linking protein modules, wherein protein module B serves to directly link the module pair A/C and protein module F serves to directly link the module pair E/G. When either the module pair A/C or E/G is a pair of deimmunized VH/VL or VL/VH protein domains from an antibody having specificity for the human CD3 antigen, protein module B or F, respectively, has the amino acid sequence as set out in SEQ ID NO.: 3. When either the module pair A/C or E/G is a pair of VH/VL or VL/NH from an antibody having specificity for the EpCAM antigen, protein module B or F, respectively, has the amino acid sequence as set out in SEQ ID NO.: 168. The module D connects the ABC and EFG module groups.

[0065] The combination of protein modules A-B-C and the combination of protein modules E-F-G each respectively constitute one scFv fragment of an antibody having specificity for either the human CD3 antigen or for the EpCAM antigen. If the modules A and C show the CD3 binding sequence, the respective groups of protein modules A-B-C and E-F-G are connected to each other through protein module D, having the sequence as set out in SEQ ID NO.: 176. On the other hand, if the modules A and C show the EpCAM binding sequence, the respective groups of protein modules A-B-C and E-F-G are connected to each other through protein module D, having the sequence as set out in SEQ ID NO.: 174. Thus, an additional serine may be inserted after the VL chain for cloning purposes. However, the skilled artisan may also use the linker as shown in SEQ ID NO.:174 in order to link a VL domain with the subsequent V domain instead of SEQ ID NO.:176. Protein module D serves to connect the C-terminal end of protein module C with the N-terminal end of protein module E.

[0066] Each nucleic acid construct in Tables 1B, 2B, 3B, 4B and 5B comprises 7 distinct nucleic acid modules, denoted A-G. Nucleic acid modules A-G are directly and covalently linked to one another in a single contiguous nucleotide chain by phosphate glycoside bonds in the order A-B-C-D-E-F-G, with nucleic acid module A at the 5′-end and nucleic acid module G at the 3′-end of a respective nucleic acid construct. Nucleic acid modules A, C, E and G denote encoding regions for antibody variable domains which can be either VH or VL domains of antibodies having specificity for the human CD3 or EpCAM antigen.

[0067] If nucleic acid module A encodes a VH antibody domain, then nucleic acid module C encodes a VL protein domain, and vice versa. If nucleic acid module E encodes a VH antibody domain, then nucleic acid module G encodes a VL protein domain, and vice versa.

[0068] Nucleic acid molecules encoding deimmunized VH domains of antibodies having specificity for the human CD3 antigen can be selected from the sequences as set out in SEQ ID NOs.: 73 or 75. Nucleic acid molecules encoding deimmunized VL domains of antibodies having specificity for the human CD3 antigen can be selected from the sequences as set out in SEQ ID NOs.: 77, 79 or 81. The nucleic acid molecule encoding the VH protein domain of the human EpCAM 3-1, 3-5, 4-1, 4-7 and 5-10 antibody is as set out in SEQ ID NO.: 136, 140, 144, 148 and 132 respectively. The nucleic acid molecule encoding the VL protein domain of the human EpCAM 3-1, 3-5, 4-1, 4-7 and 5-10 antibody is as set out in SEQ ID NO.: 138, 142, 146, 150 and 134, respectively.

[0069] Pairs of nucleic acids encoding antibody variable domains denoted by the nucleic acid module pairs A/C and E/G are joined by additional linking nucleic acid modules, wherein nucleic acid module B serves to directly link the module pair A/C and nucleic acid module F serves to directly link the module pair E/G. When either the module pair A/C or E/G denotes nucleic acid encoding a pair of deimmunized VH/VL or VL/VH protein domains from an antibody having specificity for the human CD3 antigen, nucleic acid module B or F, respectively, has the nucleotide sequence as set out in SEQ ID NO.: 202. When either the module pair A/C or E/G denotes nucleic acid encoding a pair of VH/VL or VL/VH from an antibody having specificity for the human EpCAM antigen, nucleic acid module B or F, respectively, has the nucleotide sequence as set out in SEQ ID NO.: 201.

[0070] The combination of nucleic acid modules A-B-C and the combination of nucleic acid modules E-F-G each respectively constitute one scFv fragment of an antibody having specificity for either the human CD3 antigen or for the EpCAM antigen. If the A and C modules comprise CD3 binding sequences, the respective groups of nucleic acid modules A-B-C and E-F-G are connected to each other through nucleic acid module D, having the nucleotide sequence as set out in SEQ ID NO.: 175. If the A and C modules comprise EpCAM binding sequences, the respective groups of nucleic acid modules A-B-C and E-F-G are connected to each other through nucleic acid module D, having the nucleotide sequence as set out in SEQ ID NO.: 173. However, as mentioned above, the additional codon encoding a serine (in SEQ ID NO.:175) may be inserted for cloning purposes. The skilled person may link the nucleotide sequence encoding the VL chain directly with the subsequent V domain with the linker as depicted in SEQ ID NO.: 173 without the additional codon encoding serine at the 5′ end of the linker. Nucleic acid module D serves to connect the 3′-end of nucleic acid module C with the 5′-end of nucleic acid module E.

TABLE 1A
Deimmunized anti-human CD3 constructs comprising single chain anti-EpCAM 3-1 variable regions:
amino acid sequence

| | SEQ ID NO.: in construct portion . . . | | | | | | | deimmunized anti-CD3 | Domain |
|---|---|---|---|---|---|---|---|---|---|
| Construct | A | B | C | D | E | F | G | construct/Specificity (N -> C) | Arrangement |
| 1 | 80 | 3 | 74 | 176 | 137 | 168 | 139 | CD3 (VL2/VH5) × EPCAM(3-1) | LHHL |
| 2 | 74 | 3 | 80 | 176 | 137 | 168 | 139 | CD3 (VH5/VL2) × EPCAM(3-1) | HLHL |
| 3 | 80 | 3 | 74 | 176 | 139 | 168 | 137 | CD3 (VL2/VH5) × EPCAM(3-1) | LHLH |
| 4 | 74 | 3 | 80 | 176 | 139 | 168 | 137 | CD3 (VH5/VL2) × EPCAM(3-1) | HLLH |
| 5 | 139 | 168 | 137 | 174 | 74 | 3 | 80 | EPCAM(3-1) × CD3 (VH5/VL2) | LHHL |
| 6 | 137 | 168 | 139 | 174 | 74 | 3 | 80 | EPCAM(3-1) × CD3(VH5/VL2) | HLHL |
| 7 | 139 | 168 | 137 | 174 | 80 | 3 | 74 | EPCAM(3-1) × CD3 (VL2/VH5) | LHLH |
| 8 | 137 | 168 | 139 | 174 | 80 | 3 | 74 | EPCAM(3-1) × CD3(VL2/VH5) | HLLH |
| 9 | 80 | 3 | 76 | 176 | 137 | 168 | 139 | CD3 (VL2/VH7) × EPCAM(3-1) | LHHL |
| 10 | 76 | 3 | 80 | 176 | 137 | 168 | 139 | CD3 (VH7/VL2) × EPCAM(3-1) | HLHL |
| 11 | 80 | 3 | 76 | 176 | 139 | 168 | 137 | CD3 (VL2/VH7) × EPCAM(3-1) | LHLH |
| 12 | 76 | 3 | 80 | 176 | 139 | 168 | 137 | CD3 (VH7/VL2) × EPCAM(3-1) | HLLH |
| 13 | 139 | 168 | 137 | 174 | 76 | 3 | 80 | EPCAM(3-1) × CD3 (VH7/VL2) | LHHL |
| 14 | 137 | 168 | 139 | 174 | 76 | 3 | 80 | EPCAM(3-1) × CD3(VH7/VL2) | HLHL |
| 15 | 139 | 168 | 137 | 174 | 80 | 3 | 76 | EPCAM(3-1) × CD3 (VL2/VH7) | LHLH |
| 16 | 137 | 168 | 139 | 174 | 80 | 3 | 76 | EPCAM(3-1) × CD3(VL2/VH7) | HLLH |

TABLE 1B
Deimmunized anti-human CD3 constructs comprising single chain anti-EpCAM 3-1 variable regions:
nucleotide sequence

| | SEQ ID NO.: in construct portion . . . | | | | | | | deimmunized anti-CD3 | Domain |
|---|---|---|---|---|---|---|---|---|---|
| Construct | A | B | C | D | E | F | G | construct/Specificity (N -> C) | Arrangement |
| 1 | 79 | 202 | 73 | 175 | 136 | 201 | 138 | CD3 (VL2/VH5) × EPCAM(3-1) | LHHL |
| 2 | 73 | 202 | 79 | 175 | 136 | 201 | 138 | CD3 (VH5/VL2) × EPCAM(3-1) | HLHL |
| 3 | 79 | 202 | 73 | 175 | 138 | 201 | 136 | CD3 (VL2/VH5) × EPCAM(3-1) | LHLH |
| 4 | 73 | 202 | 79 | 175 | 138 | 201 | 136 | CD3 (VH5/NL2) × EPCAM(3-1) | HLLH |
| 5 | 138 | 201 | 136 | 173 | 73 | 202 | 79 | EPCAM(3-1) × CD3 (VH5/VL2) | LHHL |
| 6 | 136 | 201 | 138 | 173 | 73 | 202 | 79 | EPCAM(3-1) × CD3(VH5/VL2) | HLHL |
| 7 | 138 | 201 | 136 | 173 | 79 | 202 | 73 | EPCAM(3-1) × CD3 (VL2/VH5) | LHLH |
| 8 | 136 | 201 | 138 | 173 | 79 | 202 | 73 | EPCAM(3-1) × CD3(VL2/VH5) | HLLH |
| 9 | 79 | 202 | 75 | 175 | 136 | 201 | 138 | CD3 (VL2/VH7) × EPCAM(3-1) | LHHL |
| 10 | 75 | 202 | 79 | 175 | 136 | 201 | 138 | CD3 (VH7/VL2) × EPCAM(3-1) | HLHL |
| 11 | 79 | 202 | 75 | 175 | 138 | 201 | 136 | CD3 (VL2/VH7) × EPCAM(3-1) | LHLH |
| 12 | 75 | 202 | 79 | 175 | 138 | 201 | 136 | CD3 (VH7/VL2) × EPCAM(3-1) | HLLH |
| 13 | 138 | 201 | 136 | 173 | 75 | 202 | 79 | EPCAM(3-1) × CD3 (VH7/VL2) | LHHL |
| 14 | 136 | 201 | 138 | 173 | 75 | 202 | 79 | EPCAM(3-1) × CD3(VH7/VL2) | HLHL |
| 15 | 138 | 201 | 136 | 173 | 79 | 202 | 75 | EPCAM(3-1) × CD3 (VL2/VH7) | LHLH |
| 16 | 136 | 201 | 138 | 173 | 79 | 202 | 75 | EPCAM(3-1) × CD3(VL2/VH7) | HLLH |

TABLE 2A
Deimmunized anti-human CD3 constructs comprising single chain anti-EpCAM 3-5
variable regions: amino acid sequence

| | SEQ ID NO.: in construct portion . . . | | | | | | | deimmunized anti-CD3 construct/ | Domain |
|---|---|---|---|---|---|---|---|---|---|
| Construct | A | B | C | D | E | F | G | Specificity (N -> C) | Arrangement |
| 1 | 80 | 3 | 74 | 176 | 141 | 168 | 143 | CD3 (VL2/VH5) × EPCAM (3-5) | LHHL |
| 2 | 74 | 3 | 80 | 176 | 141 | 168 | 143 | CD3 (VH5/VL2) × EPCAM (3-5) | HLHL |
| 3 | 80 | 3 | 74 | 176 | 143 | 168 | 141 | CD3 (VL2/VH5) × EPCAM (3-5) | LHLH |
| 4 | 74 | 3 | 80 | 176 | 143 | 168 | 141 | CD3 (VH5/VL2) × EPCAM (3-5) | HLLH |
| 5 | 143 | 168 | 141 | 174 | 74 | 3 | 80 | EPCAM (3-5) × CD3 (VH5/VL2) | LHHL |
| 6 | 141 | 168 | 143 | 174 | 74 | 3 | 80 | EPCAM (3-5) × CD3 (VH5/VL2) | HLHL |
| 7 | 143 | 168 | 141 | 174 | 80 | 3 | 74 | EPCAM (3-5) × CD3 (VL2/VH5) | LHLH |
| 8 | 141 | 168 | 143 | 174 | 80 | 3 | 74 | EPCAM (3-5) × CD3 (VL2/VH5) | HLLH |
| 9 | 80 | 3 | 76 | 176 | 141 | 168 | 143 | CD3 (VL2/VH7) × EPCAM (35) | LHHL |
| 10 | 76 | 3 | 80 | 176 | 141 | 168 | 143 | CD3 (VH7/VL2) × EPCAM (3-5) | HLHL |
| 11 | 80 | 3 | 76 | 176 | 143 | 168 | 141 | CD3 (VL2/VH7) × EPCAM (3-5) | LHLH |
| 12 | 76 | 3 | 80 | 176 | 143 | 168 | 141 | CD3 (VH7/VL2) × EPCAM (3-5) | HLLH |
| 13 | 143 | 168 | 141 | 174 | 76 | 3 | 80 | EPCAM (3-5) × CD3 (VH7/VL2) | LHHL |
| 14 | 141 | 168 | 143 | 174 | 76 | 3 | 80 | EPCAM (3-5) × CD3 (VH7/VL2) | HLHL |
| 15 | 143 | 168 | 141 | 174 | 80 | 3 | 76 | EPCAM (3-5) × CD3 (VL2/VH7) | LHLH |
| 16 | 141 | 168 | 143 | 174 | 80 | 3 | 76 | EPCAM (3-5) × CD3 (VL2/VH7) | HLLH |

TABLE 2B
Deimmunized anti-human CD3 constructs comprising single chain anti-EpCAM 3-5
variable regions: nucleotide sequence

| | SEQ ID NO.: in construct portion . . . | | | | | | | deimmunized anti-CD3 construct/ | Domain |
|---|---|---|---|---|---|---|---|---|---|
| Construct | A | B | C | D | E | F | G | Specificity (N -> C) | Arrangement |
| 1 | 79 | 202 | 73 | 175 | 140 | 201 | 142 | CD3 (VL2/VH5) × EPCAM (3-5) | LHHL |
| 2 | 73 | 202 | 79 | 175 | 140 | 201 | 142 | CD3 (VH5/VL2) × EPCAM (3-5) | HLHL |
| 3 | 79 | 202 | 73 | 175 | 142 | 201 | 140 | CD3 (VL2/VH5) × EPCAM (3-5) | LHLH |
| 4 | 73 | 202 | 79 | 175 | 142 | 201 | 140 | CD3 (VH5/VL2) × EPCAM (3-5) | HLLH |
| 5 | 142 | 201 | 140 | 173 | 73 | 202 | 79 | EPCAM (3-5) × CD3 (VH5/VL2) | LHHL |
| 6 | 140 | 201 | 142 | 173 | 73 | 202 | 79 | EPCAM (3-5) × CD3 (VH5/VL2) | HLHL |
| 7 | 142 | 201 | 140 | 173 | 79 | 202 | 73 | EPCAM (3-5) × CD3 (VL2/VH5) | LHLH |
| 8 | 140 | 201 | 142 | 173 | 79 | 202 | 73 | EPCAM (3-5) × CD3 (VL2/VH5) | HLLH |
| 9 | 79 | 202 | 75 | 175 | 140 | 201 | 142 | CD3 (VL2/VH7) × EPCAM (3-5) | LHHL |
| 10 | 75 | 202 | 79 | 175 | 140 | 201 | 142 | CD3 (VH7/VL2) × EPCAM (3-5) | HLHL |
| 11 | 79 | 202 | 75 | 175 | 142 | 201 | 140 | CD3 (VL2/VH7) × EPCAM (3-5) | LHLH |
| 12 | 75 | 202 | 79 | 175 | 142 | 201 | 140 | CD3 (VH7/VL2) × EPCAM (3-5) | HLLH |
| 13 | 142 | 201 | 140 | 173 | 75 | 202 | 79 | EPCAM (3-5) × CD3 (VH7/VL2) | LHHL |
| 14 | 140 | 201 | 142 | 173 | 75 | 202 | 79 | EPCAM (3-5) × CD3 (VH7/VL2) | HLHL |
| 15 | 142 | 201 | 140 | 173 | 79 | 202 | 75 | EPCAM (3-5) × CD3 (VL2/VH7) | LHLH |
| 16 | 140 | 201 | 142 | 173 | 79 | 202 | 75 | EPCAM (3-5) × CD3 (VL2/VH7) | HLLH |

TABLE 3A
Deimmunized anti-human CD3 constructs comprising single chain anti-EpCAM 4-1
variable regions: amino acid sequence

| | SEQ ID NO.: in construct portion . . . | | | | | | | deimmunized anti-CD3 construct/ | Domain |
|---|---|---|---|---|---|---|---|---|---|
| Construct | A | B | C | D | E | F | G | Specificity (N -> C) | Arrangement |
| 1 | 80 | 3 | 74 | 176 | 145 | 168 | 147 | CD3 (VL2/VH5) × EPCAM (4-1) | LHHL |
| 2 | 74 | 3 | 80 | 176 | 145 | 168 | 147 | CD3 (VH5/VL2) × EPCAM (4-1) | HLHL |
| 3 | 80 | 3 | 74 | 176 | 147 | 168 | 145 | CD3 (VL2/VH5) × EPCAM (4-1) | LHLH |
| 4 | 74 | 3 | 80 | 176 | 147 | 168 | 145 | CD3 (VH5/VL2) × EPCAM (4-1) | HLLH |
| 5 | 147 | 168 | 145 | 174 | 74 | 3 | 80 | EPCAM (4-1) × CD3 (VH5/VL2) | LHHL |
| 6 | 145 | 168 | 147 | 174 | 74 | 3 | 80 | EPCAM (4-1) × CD3 (VH5/VL2) | HLHL |
| 7 | 147 | 168 | 145 | 174 | 80 | 3 | 74 | EPCAM (4-1) × CD3 (VL2/VH5) | LHLH |
| 8 | 145 | 168 | 147 | 174 | 80 | 3 | 74 | EPCAM (4-1) × CD3 (VL2/VH5) | HLLH |
| 9 | 80 | 3 | 76 | 176 | 145 | 168 | 147 | CD3 (VL2/VH7) × EPCAM (4-1) | LHHL |
| 10 | 76 | 3 | 80 | 176 | 145 | 168 | 147 | CD3 (VH7/VL2) × EPCAM (4-1) | HLHL |
| 11 | 80 | 3 | 76 | 176 | 147 | 168 | 145 | CD3 (VL2/VH7) × EPCAM (4-1) | LHLH |
| 12 | 76 | 3 | 80 | 176 | 147 | 168 | 145 | CD3 (VH7/VL2) × EPCAM (4-1) | HLLH |
| 13 | 147 | 168 | 145 | 174 | 76 | 3 | 80 | EPCAM (4-1) × CD3 (VH7/VL2) | LHHL |
| 14 | 145 | 168 | 147 | 174 | 76 | 3 | 80 | EPCAM (4-1) × CD3 (VH7/VL2) | HLHL |
| 15 | 147 | 168 | 145 | 174 | 80 | 3 | 76 | EPCAM (4-1) × CD3 (VL2/VH7) | LHLH |
| 16 | 145 | 168 | 147 | 174 | 80 | 3 | 76 | EPCAM (4-1) × CD3 (VL2/VH7) | HLLH |

TABLE 3B
Deimmunized anti-human CD3 constructs comprising single chain anti-EpCAM 4-1
variable regions: nucleotide sequence

| | | | | | | | | deimmunized anti-CD3 | |
|---|---|---|---|---|---|---|---|---|---|
| | SEQ ID NO.: in construct portion . . . | | | | | | | construct/ | Domain |
| Construct | A | B | C | D | E | F | G | Specificity (N -> C) | Arrangement |
| 1 | 79 | 202 | 73 | 175 | 144 | 201 | 146 | CD3 (VL2/VH5) × EPCAM (4-1) | LHHL |
| 2 | 73 | 202 | 79 | 175 | 144 | 201 | 146 | CD3 (VH5/VL2) × EPCAM (4-1) | HLHL |
| 3 | 79 | 202 | 73 | 175 | 146 | 201 | 144 | CD3 (VL2/VH5) × EPCAM (4-1) | LHLH |
| 4 | 73 | 202 | 79 | 175 | 146 | 201 | 144 | CD3 (VH5/VL2) × EPCAM (4-1) | HLLH |
| 5 | 146 | 201 | 144 | 173 | 73 | 202 | 79 | EPCAM (4-1) × CD3 (VH5/VL2) | LHHL |
| 6 | 144 | 201 | 146 | 173 | 73 | 202 | 79 | EPCAM (4-1) × CD3 (VH5/VL2) | HLHL |
| 7 | 146 | 201 | 144 | 173 | 79 | 202 | 73 | EPCAM (4-1) × CD3 (VL2/VH5) | LHLH |
| 8 | 144 | 201 | 146 | 173 | 79 | 202 | 73 | EPCAM (4-1) × CD3 (VL2/VH5) | HLLH |
| 9 | 79 | 202 | 75 | 175 | 144 | 201 | 146 | CD3 (VL2/VH7) × EPCAM (4-1) | LHHL |
| 10 | 75 | 202 | 79 | 175 | 144 | 201 | 146 | CD3 (VH7/VL2) × EPCAM (4-1) | HLHL |
| 11 | 79 | 202 | 75 | 175 | 146 | 201 | 144 | CD3 (VL2/VH7) × EPCAM (4-1) | LHLH |
| 12 | 75 | 202 | 79 | 175 | 146 | 201 | 144 | CD3 (VH7/VL2) × EPCAM (4-1) | HLLH |
| 13 | 146 | 201 | 144 | 173 | 75 | 202 | 79 | EPCAM (4-1) × CD3 (VH7/VL2) | LHHL |
| 14 | 144 | 201 | 146 | 173 | 75 | 202 | 79 | EPCAM (4-1) × CD3 (VH7/VL2) | HLHL |
| 15 | 146 | 201 | 144 | 173 | 79 | 202 | 75 | EPCAM (4-1) × CD3 (VL2/VH7) | LHLH |
| 16 | 144 | 201 | 146 | 173 | 79 | 202 | 75 | EPCAM (4-1) × CD3 (VL2/VH7) | HLLH |

TABLE 4A
Deimmunized anti-human CD3 constructs comprising single chain anti-EpCAM 4-7
variable regions: amino acid sequence

| | | | | | | | | deimmunized anti-CD3 | |
|---|---|---|---|---|---|---|---|---|---|
| | SEQ ID NO.: in construct portion . . . | | | | | | | construct/ | Domain |
| Construct | A | B | C | D | E | F | G | Specificity (N -> C) | Arrangement |
| 1 | 80 | 3 | 74 | 176 | 149 | 168 | 151 | CD3 (VL2/VH5) × EPCAM (4-7) | LHHL |
| 2 | 74 | 3 | 80 | 176 | 149 | 168 | 151 | CD3 (VH5/VL2) × EPCAM (4-7) | HLHL |
| 3 | 80 | 3 | 74 | 176 | 151 | 168 | 149 | CD3 (VL2/VH5) × EPCAM (4-7) | LHLH |
| 4 | 74 | 3 | 80 | 176 | 151 | 168 | 149 | CD3 (VH5/VL2) × EPCAM (4-7) | HLLH |
| 5 | 151 | 168 | 149 | 174 | 74 | 3 | 80 | EPCAM (4-7) × CD3 (VH5/VL2) | LHHL |
| 6 | 149 | 168 | 151 | 174 | 74 | 3 | 80 | EPCAM (4-7) × CD3 (VH5/VL2) | HLHL |
| 7 | 151 | 168 | 149 | 174 | 80 | 3 | 74 | EPCAM (4-7) × CD3 (VL2/VH5) | LHLH |
| 8 | 149 | 168 | 151 | 174 | 80 | 3 | 74 | EPCAM (4-7) × CD3 (VL2/VH5) | HLLH |
| 9 | 80 | 3 | 76 | 176 | 149 | 168 | 151 | CD3 (VL2/VH7) × EPCAM (4-7) | LHHL |
| 10 | 76 | 3 | 80 | 176 | 149 | 168 | 151 | CD3 (VH7/VL2) × EPCAM (4-7) | HLHL |
| 11 | 80 | 3 | 76 | 176 | 151 | 168 | 149 | CD3 (VL2/VH7) × EPCAM (4-7) | LHLH |
| 12 | 76 | 3 | 80 | 176 | 151 | 168 | 149 | CD3 (VH7/VL2) × EPCAM (4-7) | HLLH |
| 13 | 151 | 168 | 149 | 174 | 76 | 3 | 80 | EPCAM (4-7) × CD3 (VH7/VL2) | LHHL |
| 14 | 149 | 168 | 151 | 174 | 76 | 3 | 80 | EPCAM (4-7) × CD3 (VH7/VL2) | HLHL |
| 15 | 151 | 168 | 149 | 174 | 80 | 3 | 76 | EPCAM (4-7) × CD3 (VL2/VH7) | LHLH |
| 16 | 149 | 168 | 151 | 174 | 80 | 3 | 76 | EPCAM (4-7) × CD3 (VL2/VH7) | HLLH |

TABLE 4B
Deimmunized anti-human CD3 constructs comprising single chain anti-EpCAM 4-7
variable regions: nucleotide sequence

| | SEQ ID NO.: in construct portion . . . | | | | | | | deimmunized anti-CD3 construct/ | Domain |
|---|---|---|---|---|---|---|---|---|---|
| Construct | A | B | C | D | E | F | G | Specificity (N -> C) | Arrangement |
| 1 | 79 | 202 | 73 | 175 | 148 | 201 | 150 | CD3 (VL2/VH5) × EPCAM (4-7) | LHHL |
| 2 | 73 | 202 | 79 | 175 | 148 | 201 | 150 | CD3 (VH5/VL2) × EPCAM (4-7) | HLHL |
| 3 | 79 | 202 | 73 | 175 | 150 | 201 | 148 | CD3 (VL2/VH5) × EPCAM (4-7) | LHLH |
| 4 | 73 | 202 | 79 | 175 | 150 | 201 | 148 | CD3 (VH5/VL2) × EPCAM (4-7) | HLLH |
| 5 | 150 | 201 | 148 | 173 | 73 | 202 | 79 | EPCAM (4-7) × CD3 (VH5/VL2) | LHHL |
| 6 | 148 | 201 | 150 | 173 | 73 | 202 | 79 | EPCAM (4-7) × CD3 (VH5/VL2) | HLHL |
| 7 | 150 | 201 | 148 | 173 | 79 | 202 | 73 | EPCAM (4-7) × CD3 (VL2/VH5) | LHLH |
| 8 | 148 | 201 | 150 | 173 | 79 | 202 | 73 | EPCAM (4-7) × CD3 (VL2/VH5) | HLLH |
| 9 | 79 | 202 | 75 | 175 | 148 | 201 | 150 | CD3 (VL2/VH7) × EPCAM (4-7) | LHHL |
| 10 | 75 | 202 | 79 | 175 | 148 | 201 | 150 | CD3 (VH7/VL2) × EPCAM (4-7) | HLHL |
| 11 | 79 | 202 | 75 | 175 | 150 | 201 | 148 | CD3 (VL2/VH7) × EPCAM (4-7) | LHLH |
| 12 | 75 | 202 | 79 | 175 | 150 | 201 | 148 | CD3 (VH7/VL2) × EPCAM (4-7) | HLLH |
| 13 | 150 | 201 | 148 | 173 | 75 | 202 | 79 | EPCAM (4-7) × CD3 (VH7/VL2) | LHHL |
| 14 | 148 | 201 | 150 | 173 | 75 | 202 | 79 | EPCAM (4-7) × CD3 (VH7/VL2) | HLHL |
| 15 | 150 | 201 | 148 | 173 | 79 | 202 | 75 | EPCAM (4-7) × CD3 (VL2/VH7) | LHLH |
| 16 | 148 | 201 | 150 | 173 | 79 | 202 | 75 | EPCAM (4-7) × CD3 (VL2/VH7) | HLLH |

TABLE 5A
Deimmunized anti-human CD3 constructs comprising single chain anti-EpCAM 5-10
variable regions: amino acid sequence

| | SEQ ID NO.: in construct portion . . . | | | | | | | deimmunized anti-CD3 construct/ | Domain |
|---|---|---|---|---|---|---|---|---|---|
| Construct | A | B | C | D | E | F | G | Specificity (N -> C) | Arrangement |
| 1 | 80 | 3 | 74 | 176 | 133 | 168 | 135 | CD3 (VL2/VH5) × EPCAM (5-10) | LHHL |
| 2 | 74 | 3 | 80 | 176 | 133 | 168 | 135 | CD3 (VH5/VL2) × EPCAM (5-10) | HLHL |
| 3 | 80 | 3 | 74 | 176 | 135 | 168 | 133 | CD3 (VL2/VH5) × EPCAM (5-10) | LHLH |
| 4 | 74 | 3 | 80 | 176 | 135 | 168 | 133 | CD3 (VH5/VL2) × EPCAM (5-10) | HLLH |
| 5 | 135 | 168 | 133 | 174 | 74 | 3 | 80 | EPCAM (5-10) × CD3 (VH5/VL2) | LHHL |
| 6 | 133 | 168 | 135 | 174 | 74 | 3 | 80 | EPCAM (5-10) × CD3 (VH5/VL2) | HLHL |
| 7 | 135 | 168 | 133 | 174 | 80 | 3 | 74 | EPCAM (5-10) × CD3 (VL2/VH5) | LHLH |
| 8 | 133 | 168 | 135 | 174 | 80 | 3 | 74 | EPCAM (5-10) × CD3 (VL2/VH5) | HLLH |
| 9 | 80 | 3 | 76 | 176 | 133 | 168 | 135 | CD3 (VL2/VH7) × EPCAM (5-10) | LHHL |
| 10 | 76 | 3 | 80 | 176 | 133 | 168 | 135 | CD3 (VH7/VL2) × EPCAM (5-10) | HLHL |
| 11 | 80 | 3 | 76 | 176 | 135 | 168 | 133 | CD3 (VL2/VH7) × EPCAM (5-10) | LHLH |
| 12 | 76 | 3 | 80 | 176 | 135 | 168 | 133 | CD3 (VH7/VL2) × EPCAM (5-10) | HLLH |
| 13 | 135 | 168 | 133 | 174 | 76 | 3 | 80 | EPCAM (5-10) × CD3 (VH7/VL2) | LHHL |
| 14 | 133 | 168 | 135 | 174 | 76 | 3 | 80 | EPCAM (5-10) × CD3 (VH7/VL2) | HLHL |
| 15 | 135 | 168 | 133 | 174 | 80 | 3 | 76 | EPCAM (5-10) × CD3 (VL2/VH7) | LHLH |
| 16 | 133 | 168 | 135 | 174 | 80 | 3 | 76 | EPCAM (5-10) × CD3 (VL2/VH7) | HLLH |

TABLE 5B
Deimmunized anti-human CD3 constructs comprising single chain anti-EpCAM 5-10
variable regions: nucleotide sequence

| | SEQ ID NO.: in construct portion . . . | | | | | | | deimmunized anti-CD3 construct/ | Domain |
|---|---|---|---|---|---|---|---|---|---|
| Construct | A | B | C | D | E | F | G | Specificity (N -> C) | Arrangement |
| 1 | 79 | 202 | 73 | 175 | 132 | 201 | 134 | CD3 (VL2/VH5) × EPCAM (5-10) | LHHL |
| 2 | 73 | 202 | 79 | 175 | 132 | 201 | 134 | CD3 (VH5/VL2) × EPCAM (5-10) | HLHL |
| 3 | 79 | 202 | 73 | 175 | 134 | 201 | 132 | CD3 (VL2/VH5) × EPCAM (5-10) | LHLH |
| 4 | 73 | 202 | 79 | 175 | 134 | 201 | 132 | CD3 (VH5/VL2) × EPCAM (5-10) | HLLH |
| 5 | 134 | 201 | 132 | 173 | 73 | 202 | 79 | EPCAM (5-10) × CD3 (VH5/VL2) | LHHL |
| 6 | 132 | 201 | 134 | 173 | 73 | 202 | 79 | EPCAM (5-10) × CD3 (VH5/VL2) | HLHL |
| 7 | 134 | 201 | 132 | 173 | 79 | 202 | 73 | EPCAM (5-10) × CD3 (VL2/VH5) | LHLH |
| 8 | 132 | 201 | 134 | 173 | 79 | 202 | 73 | EPCAM (5-10) × CD3 (VL2/VH5) | HLLH |
| 9 | 79 | 202 | 75 | 175 | 132 | 201 | 134 | CD3 (VL2/VH7) × EPCAM (5-10) | LHHL |
| 10 | 75 | 202 | 79 | 175 | 132 | 201 | 134 | CD3 (VH7/VL2) × EPCAM (5-10) | HLHL |
| 11 | 79 | 202 | 75 | 175 | 134 | 201 | 132 | CD3 (VL2/VH7) × EPCAM (5-10) | LHLH |
| 12 | 75 | 202 | 79 | 175 | 134 | 201 | 132 | CD3 (VH7/VL2) × EPCAM (5-10) | HLLH |
| 13 | 134 | 201 | 132 | 173 | 75 | 202 | 79 | EPCAM (5-10) × CD3 (VH7/VL2) | LHHL |
| 14 | 132 | 201 | 134 | 173 | 75 | 202 | 79 | EPCAM (5-10) × CD3 (VH7/VL2) | HLHL |
| 15 | 134 | 201 | 132 | 173 | 79 | 202 | 75 | EPCAM (5-10) × CD3 (VL2/VH7) | LHLH |
| 16 | 132 | 201 | 134 | 173 | 79 | 202 | 75 | EPCAM (5-10) × CD3 (VL2/VH7) | HLLH |

[0071] Most preferably, the invention provides bispecific antibody constructs comprising a specificity binding to CD3 and EpCAM and having the SEQ ID NO.:30, 31 (construct 2 of Table 1A and 1B), Seq ID. NO.: 48, 49 (construct 5 of the Table 1A, 1B), SEQ ID NO.: 64, 65 (construct 2 of Table 2A, 2B), SEQ ID NO.: 54, 55 (construct 5 of Table 2A, 2B), Seq ID NO.: 66, 67 (construct 2 of Table 3A, 3B), SEQ ID NO.: 32, 33 (construct 2 of Table 4A, 4B), SEQ ID NO.:34, 35 (construct 4 of Table 4A, 4B), SEQ ID NO.: 60, 61 (construct 5 of Table 4A, 4B), SEQ ID NO.: 36, 37 (construct 2 of Table 5A, 5B), SEQ. ID NO.: 38, 39 (construct 4 of Table 5A, 5B) or SEQ ID NO.:62, 63 (construct 5 of Table 5A, 5B).

[0072] In accordance with constructs provided herein above, particularly preferred CD3 and EpCAM binding constructs of the invention, comprising at least the above described first domain with reduced propensity for T cell epitope generation and specificity for human CD3 and a second, Ig-derived domain which is specific for EpCAM are shown in SEQ ID NOs.: 31, 33, 35, 37, 39, 49, 55, 58, 61, 63, 65, 67, 237, 239, 241, 243, 245, 247, 249, 251, 253, 255, 257, 259, 261, 263, 265, 267, 269, 271, 273, 275, 277, 279, 281, 283, 285, 287, 289, 291, 293, 295, 297, 299, 301, 303, 305, 307, 309, 311, 313, 315, 317, 319, 321, 323 and 325. Corresponding nucleic acid molecules encoding said preferred CD3 and EpCAM binding constructs as defined herein comprise SEQ ID NOs.: 30, 32, 34, 36, 38, 48, 54, 57, 60, 62, 64, 66, 236, 238, 240, 242, 244, 246, 248, 250, 252, 254, 256, 258, 260, 262, 264, 266, 268, 270, 272, 274, 276, 278, 280, 282, 284, 286, 288, 290, 292, 294, 296, 298, 300, 302, 304, 306, 308, 310, 312, 314, 316, 318, 320, 322 and 324.

[0073] Accordingly, the present invention also provides for CD3 specific binding constructs comprising a first domain which specifically binds to human CD3 and has reduced propensity to generate T cell epitopes and comprising an Ig-derived second domain directed against/capable of binding to EpCAM, selected from the group consisting of
[0074] (a) an amino acid sequence as shown in any one of SEQ ID NO.: 31, 33, 35, 37, 39, 49, 55, 58, 61, 63, 65, 67, 237, 239, 241, 243, 245, 247, 249, 251, 253, 255, 257, 259, 261, 263, 265, 267, 269, 271, 273, 275, 277, 279, 281, 283, 285, 287, 289, 291, 293, 295, 297, 299, 301, 303, 305, 307, 309, 311, 313, 315, 317, 319, 321, 323 or 325;
[0075] (b) an amino acid sequence encoded by a nucleic acid sequence as shown in any one of SEQ ID NO.: 30, 32, 34, 36, 38, 48, 54, 57, 60, 62, 64, 66, 236, 238, 240, 242, 244, 246, 248, 250, 252, 254, 256, 258, 260, 262, 264, 266, 268, 270, 272, 274, 276, 278, 280, 282, 284, 286, 288, 290, 292, 294, 296, 298, 300, 302, 304, 306, 308, 310, 312, 314, 316, 318, 320, 322 or 324;
[0076] (c) an amino acid sequence encoded by a nucleic acid sequence which is degenerate as a result of the genetic code to a nucleotide sequence of (b);
[0077] (d) an amino acid sequence encoded by a nucleic acid sequence hybridizing with the complementary strand of a nucleic acid sequence as defined in (b) under stringent hybridization conditions.

[0078] The present invention also provides for CD3 specific binding constructs comprising a first domain which specifically binds to human CD3 and has reduced propensity to generate T cell epitopes and comprising an Ig-derived second domain directed against/capable of binding to EpCAM, which comprise an amino acid sequence encoded by a nucleic acid sequence hybridizing with the complementary strand of a nucleic acid sequence as defined in (b) herein above, i.e. to a nucleic acid sequence as shown in any one of SEQ ID NO.: 30, 32, 34, 36, 38, 48, 54, 57, 60, 62, 64, 66, 236, 238, 240, 242, 244, 246, 248, 250, 252, 254, 256, 258, 260, 262, 264, 266, 268, 270, 272, 274, 276, 278, 280, 282, 284, 286, 288, 290, 292, 294, 296, 298, 300, 302, 304, 306, 308, 310, 312, 314, 316, 318, 320, 322 or 324 under stringent hybridization conditions.

[0079] The term “hybridizing” as used herein refers to polynucleotides/nucleic acid sequences which are capable of hybridizing to the polynucleotides encoding the deimmunized constructs as defined herein. Therefore, said polynucleotides may be useful as probes in Northern or Southern Blot analysis of RNA or DNA preparations, respectively, or can be used as oligonucleotide primers in PCR analysis dependent on their respective size. Preferably, said hybridizing polynucleotides comprise at least 10, more preferably at least 15 nucleotides in length while a hybridizing polynucleotide of the present invention to be used as a probe preferably comprises at least 100, more preferably at least 200, or most preferably at least 500 nucleotides in length.

[0080] It is well known in the art how to perform hybridization experiments with nucleic acid molecules, i.e. the person skilled in the art knows what hybridization conditions s/he has to use in accordance with the present invention. Such hybridization conditions are referred to in standard text books such as Molecular Cloning A Laboratory Manual, Cold Spring Harbor Laboratory (2001) N.Y. Preferred in accordance with the present inventions are polynucleotides which are capable of hybridizing to the polynucleotides of the invention or parts thereof, under stringent hybridization conditions.

[0081] “Stringent hybridization conditions” refer, i.e. to an overnight incubation at 42° C. in a solution comprising 50% formamide, 5×SSC (750 mM NaCl, 75 mM sodium citrate), 50 mM sodium phosphate (pH 7.6), 5×Denhardt's solution, 10% dextran sulfate, and 20 μg/ml denatured, sheared salmon sperm DNA, followed by washing the filters in 0.1×SSC at about 65° C. Also contemplated are nucleic acid molecules that hybridize to the polynucleotides of the invention at lower stringency hybridization conditions. Changes in the stringency of hybridization and signal detection are primarily accomplished through the manipulation of formamide concentration (lower percentages of formamide result in lowered stringency); salt conditions, or temperature. For example, lower stringency conditions include an overnight incubation at 37° C. in a solution comprising 6×SSPE (20×SSPE=3M NaCl; 0.2M NaH₂PO₄; 0.02M EDTA, pH 7.4), 0.5% SDS, 30% formamide, 100 μg/ml salmon sperm blocking DNA; followed by washes at 50° C. with 1×SSPE, 0.1% SDS. In addition, to achieve even lower stringency, washes performed following stringent hybridization can be done at higher salt concentrations (e.g. 5×SSC). It is of note that variations in the above conditions may be accomplished through the inclusion and/or substitution of alternate blocking reagents used to suppress background in hybridization experiments. Typical blocking reagents include Denhardt's reagent, BLOTTO, heparin, denatured salmon sperm DNA, and commercially available proprietary formulations. The inclusion of specific blocking reagents may require modification of the hybridization conditions described above, due to problems with compatibility.

[0082] The recited nucleic acid molecules may be, e.g., DNA, cDNA, RNA or synthetically produced DNA or RNA or a recombinantly produced chimeric nucleic acid molecule comprising any of those polynucleotides either alone or in combination. The deimmunized CD3 and EpCAM binding constructs provided in this invention are particularly useful in medical settings, for example in the prevention, treatment and/or the amelioration of tumorous diseases, in particular, breast cancer, colon cancer, prostate cancer, head and neck cancer, skin cancer (melanoma), cancers of the genito-urinary tract, e.g. ovarial cancer, endometrial cancer, cervix cancer and kidney cancer, lung cancer, gastric cancer, cancer of the small intestine, liver cancer, pancreas cancer, gall bladder cancer, cancers of the bile duct, esophagus cancer, cancer of the salivatory glands and cancer of the thyroid gland. In particular, the deimmunized constructs binding CD3 and EpCAM can be used for the treatment of epithelial cancer, preferably adenocarcinomas, or minimal residual disease, more preferably early solid tumor, advanced solid tumor or metastatic solid tumor.

[0083] In a more particularly preferred embodiment of the CD3 specific binding construct described herein, said construct comprises a second Ig-derived domain which comprises an antigen-interaction site with a specificity for CCR5.

[0084] The chemokine receptor CCR5 is a member of a large family of G protein coupled seven transmembrane domain receptors that binds the proinflammatory chemokines RANTES, MIP1-α, MIP1-β and MCP-2. Chemokines act in concert with adhesion molecules to induce the extravasation of leukocytes and to direct their migration to sites of tissue injury. CCR5 is expressed on a minority of T-cells and monocytes and is further the major co-receptor for M-trophic HIV-1 strains that predominate early in the course of an HIV-infection.

[0085] Human immunodeficiency virus (HIV) cannot enter human cells unless it first binds to two key molecules on the cell surface, CD4 and a co-receptor. The co-receptor that is initially recognized is CCR5, later in the life cycle of the virus another chemokine receptor CXCR4 becomes the co-receptor for HIV-1 (D'Souza, Nature Med. 2, 1293 (1996); Premack, Nature Med. 2, 1174; Fauci, Nature 384, 529 (1996)). The HIV-1 strains that cause most transmissions of viruses by sexual contact are called M-tropic viruses. These HIV-1 strains (also known as non-syncytia inducing (NSI) primary viruses) can replicate in primary CD4+ T-cells and mac rophages and use the chemokine receptor CCR5 (and, less often, CCR3) as their coreceptor. The T-tropic viruses (sometimes called syncytia inducing (SI) primary visuses) can also replicate in primary CD4+ T-cells but can in addition infect established CD4+ T-cell lines in vitro, which they do via the chemokine receptor CXCR4 (fusin). Many of these T-tropic strains can use CCR5 in addition to CXCR4, and some can enter macrophages via CCR5, at least under certain in vitro conditions (D'Souza, Nature Med. 2, 1293 (1996); Premack, Nature Med. 2, 1174; Fauci, Nature 384, 529 (1996)). Whether other coreceptors contribute to HIV-1 pathogenesis is unresolved, but the existence of another coreceptor for some T-tropic strains can be inferred from in vitro studies. Because M-tropic HIV-1 strains are implicated in about 90% of sexual transmissions of HIV, CCR5 is the predominant coreceptor for the virus in patients; transmission (or systemic establishment) of CXCR4-using (T-tropic) strains is rare (D'Souza, Nature Med. 2, 1293 (1996); Premack, Nature Med. 2, 1174; Fauci, Nature 384, 529 (1996), Paxton, Nature Med. 2, 412 (1996); Liu, Cell 86, 367 (1996); Samson, Nature 382, 722 (1996); Dean, Science 273, 1856 (1996); Huang, Nature Med. 2, 1240 (1996)). However, once SI viruses evolve in vivo (or if they are transmitted), they are especially virulent and cause faster disease progression (D'Souza, Nature Med. 2, 1293 (1996); Premack, Nature Med. 2, 1174; Fauci, Nature 384, 529 (1996), Schuitemaker, J. Virol. 66, 1354 (1992); Connor, J. Virol. 67, 1772 (1993); Richman, J. Infect. Dis. 169, 968 (1994); R. I. Connor et al., J. Exp. Med. 185, 621 (1997); Trkola, Nature 384, 184 (1996)).

[0086] The numbers and identity of coreceptor molecules on target cells, and the ability of HIV-1 strains to likely enter cells via the different coreceptors, seem to be critical determinants of disease progression. These factors are major influences on both host- and virus-dependent aspects of HIV-1 infection. For example, a homozygous defect (delta 32) in CCR5 correlates strongly with resistance to HIV-1 infection in vivo and in vitro. Individuals who are heterozygous for a defective CCR5 allele are at best weakly protected against infection and have only a modestly slowed disease progression (Paxton, Nature Med. 2, 412 (1996); Liu, Cell 86, 367 (1996); Samson, Nature 382, 722 (1996); Dean, Science 273, 1856 (1996); Huang et al., Nature Med. 2, 1240 (1996)). However, other factors can influence the level of CCR5 expression on activated CD4+ T-cells and thereby affect the efficiency of HIV-1 infection in vitro (Trkola, Nature 384, 184 (1996); Bleul, Proc. Natl. Acad. Sci. U.S.A. 94, 1925 (1997)).

[0087] For multiple sclerosis it was shown that CCR5 and CXCR3 are predominantly expressed on T-cells infiltrating demyelinating brain lesions, as well as in the peripheral blood of affected patients. Elimination of the T-cells would block the T-cell arm of this autoimmune disease.

[0088] High expression of CCR3 and CCR5 was also observed in T cells and B cells of lymph nodes derived from patients with Hodgkin's disease.

[0089] Diabetes type I is considered to be a T-cell mediated autoimmune disease. The expression of CCR5 receptor in the pancreas was associated with the progression of type I diabetes in relevant animal models (Cameron (2000) J. Immunol. 165, 1102-1110). In particular, the CCR5 expression was associated with the development of insulinitis and spontaneous type I diabetes.

[0090] Several antibodies specifically binding to (human) CCR5 are known in the art and comprise, MC-1 (Mack (1998) J. Exp. Med. 187, 1215-1224 or MC-5 (Blanpain (2002) Mol Biol Cell. 13:723-37, Segerer (1999) Kidney. Int. 56:52-64, Kraft (2001) J Biol. Chem. 14; 276:34408-18). The CCR-5 antibodies, in particular MC-1 and MC-5 may serve as a source for Ig-derived second domain of the CD3 specific construct of the invention. Accordingly, in a preferred embodiment, the invention relates to a bispecific construct comprising at least two domains, wherein the first domain provides for the specificity to human CD3 and has a reduced propensity to generate T cell epitopes and whereby said Ig-derived second domain is derived from an antibody specific for (human) CCR5. Most preferably, such a construct is a single chain scFV as defined herein.

[0091] MC-1 was shown to bind specifically to the first part of the second extracellular loop of human CCR5 and did not crossreact with CCR5 derived from rhesus macaques as shown in the appended examples. Therefore, it is preferred that the CD3 specific construct of this invention comprises, for example, VL and VH domains of an antibody (i.e. an Ig-derived second domain) specific for CCR5, preferably the human CCR5, and VH and VL domains of an antibody specific for the CD3 antigen. Said antibody specific for the human CCR5 is the murine anti-human CCR5 antibody MC-1, described, inter alia, in Mack (1998), J. Exp. Med. 187, 1215-1224 and in the appended examples. Yet, it is envisaged that other anti-CCR5 antibodies, like MC-5 (as characterized in the appended examples and disclosed in Blanpain (2002) Mol Biol Cell. 13:723-37, Segerer (1999) Kidney Int. 56:52-64 and Kraft (2001) Biol. Chem. 14; 276:34408-18 may be employed in the context of this invention.

[0092] In a particularly preferred embodiment of the present invention, CD3-specific binding constructs are provided, which comprise a deimmunized domain directed against/binding to/interacting with human CD3 and a second Ig-derived domain which specifically binds to/interacts with CCR5. Such constructs are shown in Table 6A and 6B. The modules A-G in Tables 6A and 6B can be defined as mentioned above for Tables 1-5. Deimmunized VH domains of antibodies having specificity for the human CD3 antigen can be selected from the sequences as set out in SEQ ID NOs.: 74 or 76. Deimmunized VL domains of antibodies having specificity for the human CD3 antigen can be selected from the sequences as set out in SEQ ID NOs.: 78, 80 or 82. The VH protein domain of human CCR5 antibody is as set out in SEQ ID NO.: 129. The VL protein domain of human CCR5 antibody is as set out in SEQ ID NO.: 131. When either the module pair A/C or E/G is a pair of deimmunized VH/VL or VL/VH protein domains from an antibody having specificity for the human CD3 antigen, protein module B or F, respectively, has the amino acid sequence as set out in SEQ ID NO.: 3. When either the module pair A/C or E/G is a pair of VH/VL or VL/VH from an antibody having specificity for the EpCAM antigen, protein module B or F, respectively, has the amino acid sequence as set out in SEQ ID NO.: 168. The respective groups of protein modules A-B-C and E-F-G are connected to each other through protein module D, having the sequence as set out in SEQ ID NO.: 174. However, as mentioned above an additional serine may be introduced for cloning purposes (linker as depicted in SEQ ID NO.:176) between the VL and subsequent V domain.

[0093] Nucleic acid molecules encoding deimmunized VH domains of antibodies having specificity for the human CD3 antigen can be selected from the sequences as set out in SEQ ID NOs.: 73 or 75. Nucleic acid molecules encoding deimmunized VL domains of antibodies having specificity for the human CD3 antigen can be selected from the sequences as set out in SEQ ID NOs.: 77, 79 or 81. The nucleic acid molecule encoding the VH protein domain of the human CCR5 antibody is as set out in SEQ ID NO.: 128. The nucleic acid molecule encoding the VL protein domain of the human CCR5 antibody is as set out in SEQ ID NO.: 130. When either the module pair A/C or E/G denotes nucleic acid encoding a pair of deimmunized VH/VL or VL/VH protein domains from an antibody having specificity for the human CD3 antigen, nucleic acid module B or F, respectively, has the nucleic acid sequence as set out in SEQ ID NO.: 202. When either the module pair A/C or E/G denotes nucleic acid enconding a pair of VH/VL or VL/VH from an antibody having specificity for the CCR5 antigen, nucleic acid module B or F, respectively, has the nucleic acid sequence as set out in SEQ ID NO.: 201. The groups of nucleic acid modules A-B-C and E-F-G are connected to each other through protein module D, having the sequence as set out in SEQ ID NO.: 173. An alternative linker SEQ ID NO.:175 may also be used to conjugate VL domain with a subsequent V domain (including an additional codon encoding a serine residue for cloning purposes).

TABLE 6A
Deimmunized anti-human CD3 constructs comprising single chain anti-CCR5
variable regions: amino acid sequence

| | SEQ ID NO.: in construct portion . . . | | | | | | | deimmunized anti-CD3 construct/ | Domain |
|---|---|---|---|---|---|---|---|---|---|
| Construct | A | B | C | D | E | F | G | Specificity (N -> C) | Arrangement |
| 1 | 80 | 3 | 74 | 174 | 129 | 168 | 131 | CD3 (VL2/VH5) × CCR5 | LHHL |
| 2 | 74 | 3 | 80 | 174 | 129 | 168 | 131 | CD3 (VH5/VL2) × CCR5 | HLHL |
| 3 | 80 | 3 | 74 | 174 | 131 | 168 | 129 | CD3 (VL2/VH5) × CCR5 | LHLH |
| 4 | 74 | 3 | 80 | 174 | 131 | 168 | 129 | CD3 (VH5/VL2) × CCR5 | HLLH |
| 5 | 131 | 168 | 129 | 174 | 74 | 3 | 80 | CCR5 × CD3 (VH5/VL2) | LHHL |
| 6 | 129 | 168 | 131 | 174 | 74 | 3 | 80 | CCR5 × CD3 (VH5/VL2) | HLHL |
| 7 | 131 | 168 | 129 | 174 | 80 | 3 | 74 | CCR5 × CD3 (VL2/VH5) | LHLH |
| 8 | 129 | 168 | 131 | 174 | 80 | 3 | 74 | CCR5 × CD3 (VL2/VH5) | HLLH |
| 9 | 80 | 3 | 76 | 174 | 129 | 168 | 131 | CD3 (VL2/VH7) × CCR5 | LHHL |
| 10 | 76 | 3 | 80 | 174 | 129 | 168 | 131 | CD3 (VH7/VL2) × CCR5 | HLHL |
| 11 | 80 | 3 | 76 | 174 | 131 | 168 | 129 | CD3 (VL2/VH7) × CCR5 | LHLH |
| 12 | 76 | 3 | 80 | 174 | 131 | 168 | 129 | CD3 (VH7/VL2) × CCR5 | HLLH |
| 13 | 131 | 168 | 129 | 174 | 76 | 3 | 80 | CCR5 × CD3 (VH7/VL2) | LHHL |
| 14 | 129 | 168 | 131 | 174 | 76 | 3 | 80 | CCR5 × CD3 (VH7/VL2) | HLHL |
| 15 | 131 | 168 | 129 | 174 | 80 | 3 | 76 | CCR5 × CD3 (VL2/VH7) | LHLH |
| 16 | 129 | 168 | 131 | 174 | 80 | 3 | 76 | CCR5 × CD3 (VL2/VH7) | HLLH |

TABLE 6B
Deimmunized anti-human CD3 constructs comprising single chain anti-CCR5
variable regions: nucleic acid sequence

| | SEQ ID NO.: in construct portion . . . | | | | | | | deimmunized anti-CD3 construct/ | Domain |
|---|---|---|---|---|---|---|---|---|---|
| Construct | A | B | C | D | E | F | G | Specificity (N -> C) | Arrangement |
| 1 | 79 | 202 | 73 | 173 | 128 | 201 | 130 | CD3 (VL2/VH5) × CCR5 | LHHL |
| 2 | 73 | 202 | 79 | 173 | 128 | 201 | 130 | CD3 (VH5/VL2) × CCR5 | HLHL |
| 3 | 79 | 202 | 73 | 173 | 130 | 201 | 128 | CD3 (VL2/VH5) × CCR5 | LHLH |
| 4 | 73 | 202 | 79 | 173 | 130 | 201 | 128 | CD3 (VH5/VL2) × CCR5 | HLLH |
| 5 | 130 | 201 | 128 | 173 | 73 | 202 | 79 | CCR5 × CD3 (VH5/VL2) | LHHL |
| 6 | 128 | 201 | 130 | 173 | 73 | 202 | 79 | CCR5 × CD3 (VH5/VL2) | HLHL |
| 7 | 130 | 201 | 128 | 173 | 79 | 202 | 73 | CCR5 × CD3 (VL2/VH5) | LHLH |
| 8 | 128 | 201 | 130 | 173 | 79 | 202 | 73 | CCR5 × CD3 (VL2/VH5) | HLLH |
| 9 | 79 | 202 | 75 | 173 | 128 | 201 | 130 | CD3 (VL2/VH7) × CCR5 | LHHL |
| 10 | 75 | 202 | 79 | 173 | 128 | 201 | 130 | CD3 (VH7/VL2) × CCR5 | HLHL |
| 11 | 79 | 202 | 75 | 173 | 130 | 201 | 128 | CD3 (VL2/VH7) × CCR5 | LHLH |
| 12 | 75 | 202 | 79 | 173 | 130 | 201 | 128 | CD3 (VH7/VL2) × CCR5 | HLLH |
| 13 | 130 | 201 | 128 | 173 | 75 | 202 | 79 | CCR5 × CD3 (VH7/VL2) | LHHL |
| 14 | 128 | 201 | 130 | 173 | 75 | 202 | 79 | CCR5 × CD3 (VH7/VL2) | HLHL |
| 15 | 130 | 201 | 128 | 173 | 79 | 202 | 75 | CCR5 × CD3 (VL2/VH7) | LHLH |
| 16 | 128 | 201 | 130 | 173 | 79 | 202 | 75 | CCR5 × CD3 (VL2/VH7) | HLLH |

[0094] Preferably, said constructs comprise an amino acid sequence selected from the group of
[0095] (a) an amino acid sequence as shown in any one of SEQ ID NO.: 206, 208, 210, 212, 214 or 216;
[0096] (b) an amino acid sequence encoded by a nucleic acid sequence as shown in any one of in SEQ ID NO.: 205, 207, 209, 211, 213 or 215; and
[0097] (c) an amino acid sequence encoded by a nucleic acid sequence which is degenerate as a result of the genetic code to a nucleotide sequence of (b);
[0098] (d) and amino acid sequence encoded by a nucleic acid sequence hybridising with the complementary strand of a nucleic acid sequence as defined in (b) under stringent hybridisation conditions.

[0099] The CCR5 and CD3 binding constructs SEQ ID NO.:206, 208, 210 represent construct 5 and SEQ ID NO.:212, 214 and 216 represent construct 13 of Table 6 and have the three different VL regions (VL1 (SEQ ID NO.:78), VL2 (SEQ ID NO.:80), or VL3 (SEQ ID NO.:82).

[0100] The present invention also provides for CD3 specific binding constructs comprising a first domain which specifically binds to human CD3 and has reduced propensity to generate T cell epitopes and comprising an Ig-derived second domain directed against/capable of binding to CCR5, which comprise an amino acid sequence encoded by a nucleic acid sequence hybridizing with the complementary strand of a nucleic acid sequence as defined in (b) herein above, i.e. to a nucleic acid sequence as shown in any one of SEQ ID NO.: 205, 207, 209, 211, 213 or 215 under stringent hybridization conditions. The terms “hybridization” and “stringent conditions” have been described herein above. The corresponding definitions and embodiments apply here mutatis mutandis.

[0101] The deimmunized CD3 and CCR5 binding constructs provided herein are particularly useful in the medical intervention of viral disease, in particular HIV infections and AIDS, or of autoimmune diseases and/or inflammatory diseases, like rheumatoid arthritis.

[0102] In another embodiment, the present invention provides for CD3 specific binding constructs as defined herein above, wherein the Ig-derived second domain of the inventive construct comprises an antigen-interaction site with specificity for CD19.

[0103] CD19 has proved to be a very useful medical target. CD19 is expressed in the whole B cell lineage from the pro B cell to the mature B cell, it is not shed, is uniformly expressed on all lymphoma cells, and is absent from stem cells (Haagen, Clin Exp Immunol 90 (1992), 368-75; Uckun, Proc. Natl. Acad. Sci. USA 85 (1988), 8603-7). Combination therapy employing both an antibody directed against CD19 and an additional immunoregulatory antibody has been disclosed for the treatment of B cell malignancies (WO 02/04021, US2002006404, US2002028178) and autoimmune diseases (WO 02/22212, US2002058029). WO 00/67795 discloses the use i.a. of antibodies directed against CD19 for the treatment of indolent and aggressive forms of B-cell lymphomas, as well as acute and chronic forms of lymphatic leukemias. WO 02/80987 discloses the therapeutic use of immunotoxins based on antibodies against the antigen CD19 for the treatment of such diseases as B cell non-Hodgkin's lymphoma, Hodgkin's lymphoma or B cell leukemias (e.g. B cell acute lymphatic leukemia (B-ALL), (e.g. hairy cell lymphoma) B cell precursor acute lymphatic leukemia (pre-B-ALL), B cell chronic lymphatic leukemia (B-CLL)).

[0104] In a particularly preferred embodiment of the present invention, CD3-specific binding constructs are provided, which comprise an deimmunized domain directed against/binding to/interacting with human CD3 and a second Ig-derived domain which specifically binds to/interacts with CD19. Such constructs are shown in Tables 7A and 7B. The modules A-G in Tables 7A and 7B can be defined as mentioned above for Tables 1-5. Deimmunized VH domains of antibodies having specificity for the human CD3 antigen can be selected from the sequences as set out in SEQ ID NOs.: 74 or 76. Deimmunized VL domains of antibodies having specificity for the human CD3 antigen can be selected from the sequences as set out in SEQ ID NOs.: 78, 80 or 82. The VH protein domain of human CD19 antibody is as set out in SEQ ID NO.: 114. The VL protein domain of human CCR5 antibody is as set out in SEQ ID NO.: 116. When either the module pair A/C or E/G is a pair of deimmunized VH/VL or VL/VH protein domains from an antibody having specificity for the human CD3 antigen, protein module B or F, respectively, has the amino acid sequence as set out in SEQ ID NO.: 3. When either the module pair A/C or E/G is a pair of VH/VL or VL/VH from an antibody having specificity for the CD19 antigen, protein module B or F, respectively, has the amino acid sequence as set out in SEQ ID NO.: 168. The respective groups of protein modules A-B-C and E-F-G are connected to each other through protein module D, having the sequence as set out in SEQ ID NO.: 174. However, as mentioned above an additional serine may be introduced for cloning purposes (linker as depicted in SEQ ID NO.:176) between the VL and subsequent V domain.

[0105] Nucleic acid molecules encoding deimmunized VH domains of antibodies having specificity for the human CD3 antigen can be selected from the sequences as set out in SEQ ID NOs.: 73 or 75. Nucleic acid molecules encoding deimmunized VL domains of antibodies having specificity for the human CD3 antigen can be selected from the sequences as set out in SEQ ID NOs.: 77, 79 or 81. The nucleic acid molecule encoding the VH protein domain of the human CD19 antibody is as set out in SEQ ID NO.: 113. The nucleic acid molecule encoding the VL protein domain of the human CCR5 antibody is as set out in SEQ ID NO.: 115. When either the module pair A/C or E/G denotes nucleic acid encoding a pair of deimmunized VH/VL or VL/VH protein domains from an antibody having specificity for the human CD3 antigen, nucleic acid module B or F, respectively, has the amino acid sequence as set but in SEQ ID NO.: 202. When either the module pair A/C or E/G denotes a nucleic acid encoding a pair of VH/VL or VL/VH from an antibody having specificity for the CD19 antigen, nucleic acid module B or F, respectively, has the nucleic acid sequence as set out in SEQ ID NO.: 201. The groups of nucleic acid modules A-B-C and E-F-G are connected to each other through protein module D, having the sequence as set out in SEQ ID NO.: 173. An alternative linker SEQ ID NO.:175 may also be used to conjugate VL domain with a subsequent V domain (including an additional codon encoding a serine residue for cloning purposes).

TABLE 7A
Deimmunized anti-human CD3 constructs comprising single chain anti-CD19
variable regions: amino acid sequence

| | SEQ ID NO.: in construct portion . . . | | | | | | | deimmunized anti-CD3 construct/ | Domain |
|---|---|---|---|---|---|---|---|---|---|
| Construct | A | B | C | D | E | F | G | Specificity (N -> C) | Arrangement |
| 1 | 80 | 3 | 74 | 174 | 114 | 168 | 116 | CD3 (VL2/VH5) × CD19 | LHHL |
| 2 | 74 | 3 | 80 | 174 | 114 | 168 | 116 | CD3 (VH5/VL2) × CD19 | HLHL |
| 3 | 80 | 3 | 74 | 174 | 116 | 168 | 114 | CD3 (VL2/VH5) × CD19 | LHLH |
| 4 | 74 | 3 | 80 | 174 | 116 | 168 | 114 | CD3 (VH5/VL2) × CD19 | HLLH |
| 5 | 116 | 168 | 114 | 174 | 74 | 3 | 80 | CD19 × CD3 (VH5/VL2) | LHHL |
| 6 | 114 | 168 | 116 | 174 | 74 | 3 | 80 | CD19 × CD3 (VH5/VL2) | HLHL |
| 7 | 116 | 168 | 114 | 174 | 80 | 3 | 74 | CD19 × CD3 (VL2/VH5) | LHLH |
| 8 | 114 | 168 | 116 | 174 | 80 | 3 | 74 | CD19 × CD3 (VL2/VH5) | HLLH |
| 9 | 80 | 3 | 76 | 174 | 114 | 168 | 116 | CD3 (VL2/VH7) × CD19 | LHHL |
| 10 | 76 | 3 | 80 | 174 | 114 | 168 | 116 | CD3 (VH7/VL2) × CD19 | HLHL |
| 11 | 80 | 3 | 76 | 174 | 116 | 168 | 114 | CD3 (VL2/VH7) × CD19 | LHLH |
| 12 | 76 | 3 | 80 | 174 | 116 | 168 | 114 | CD3 (VH7/VL2) × CD19 | HLLH |
| 13 | 116 | 168 | 114 | 174 | 76 | 3 | 80 | CD19 × CD3 (VH7/VL2) | LHHL |
| 14 | 114 | 168 | 116 | 174 | 76 | 3 | 80 | CD19 × CD3 (VH7/VL2) | HLHL |
| 15 | 116 | 168 | 114 | 174 | 80 | 3 | 76 | CD19 × CD3 (VL2/VH7) | LHLH |
| 16 | 114 | 168 | 116 | 174 | 80 | 3 | 76 | CD19 × CD3 (VL2/VH7) | HLLH |

TABLE 7B
Deimmunized anti-human CD3 constructs comprising single chain anti-CD19
variable regions: Nucleic acid sequence

| | SEQ ID NO.: in construct portion ... | | | | | | | deimmunized anti-CD3 construct/ | Domain |
|---|---|---|---|---|---|---|---|---|---|
| Construct | A | B | C | D | E | F | G | Specificity (N -> C) | Arrangement |
| 1 | 79 | 202 | 73 | 173 | 113 | 201 | 115 | CD3 (VL2/VH5) × CD19 | LHHL |
| 2 | 73 | 202 | 79 | 173 | 113 | 201 | 115 | CD3 (VH5/VL2) × CD19 | HLHL |
| 3 | 79 | 202 | 73 | 173 | 115 | 201 | 113 | CD3 (VL2/VH5) × CD19 | LHLH |
| 4 | 73 | 202 | 79 | 173 | 115 | 201 | 113 | CD3 (VH5/VL2) × CD19 | HLLH |
| 5 | 115 | 201 | 113 | 173 | 73 | 202 | 79 | CD19 × CD3 (VH5/VL2) | LHHL |
| 6 | 113 | 201 | 115 | 173 | 73 | 202 | 79 | CD19 × CD3 (VH5/VL2) | HLHL |
| 7 | 115 | 201 | 113 | 173 | 79 | 202 | 73 | CD19 × CD3 (VL2/VH5) | LHLH |
| 8 | 113 | 201 | 115 | 173 | 79 | 202 | 73 | CD19 × CD3 (VL2/VH5) | HLLH |
| 9 | 79 | 202 | 75 | 173 | 113 | 201 | 115 | CD3 (VL2/VH7) × CD19 | LHHL |
| 10 | 75 | 202 | 79 | 173 | 113 | 201 | 115 | CD3 (VH7/VL2) × CD19 | HLHL |
| 11 | 79 | 202 | 75 | 173 | 115 | 201 | 113 | CD3 (VL2/VH7) × CD19 | LHLH |
| 12 | 75 | 202 | 79 | 173 | 115 | 201 | 113 | CD3 (VH7/VL2) × CD19 | HLLH |
| 13 | 115 | 201 | 113 | 173 | 75 | 202 | 79 | CD19 × CD3 (VH7/VL2) | LHHL |
| 14 | 113 | 201 | 115 | 173 | 75 | 202 | 79 | CD19 × CD3 (VH7/VL2) | HLHL |
| 15 | 115 | 201 | 113 | 173 | 79 | 202 | 75 | CD19 × CD3 (VL2/VH7) | LHLH |
| 16 | 113 | 201 | 115 | 173 | 79 | 202 | 75 | CD19 × CD3 (VL2/VH7) | HLLH |

[0106] In a more preferred embodiment, the present invention provides for a deimmunized CD3-specific binding construct which comprises a CD3-binding domain as defined above and a second, Ig-derived domain which specifically binds to/interacts with CD19, preferably human CD19, wherein said CD3-specific binding construct comprises an amino acid sequence selected from the group of
[0107] (a) an amino acid sequence as shown in any one of SEQ ID NO.: 190, 192, 194, 196, 198, 200, 327, 329, 331, 333, 335, 337, 339, 341, 343, 345, 347, 349, 351, 353, 357, 359, 361, 363, 365, 367, 369, 371, 373, 375, 377, 379, 381, 383, 385, 387, 389, 391, 393, 395, 397, 399, 401, 403, 405, 407 or 409;
[0108] (b) an amino acid sequence encoded by a nucleic acid sequence as shown in any one of in SEQ ID NO.: 189, 191, 193, 195, 197, 199, 326, 328, 330, 332, 334, 336, 338, 340, 342, 344, 346, 348, 350, 352, 354, 356, 358, 360, 362, 364, 366, 368, 370, 372, 374, 376, 378, 380, 382, 384, 386, 388, 390, 392, 394, 396, 398, 400, 402, 404, 406 or 408; and
[0109] (c) an amino acid sequence encoded by a nucleic acid sequence which is degenerate as a result of the genetic code to a nucleotide sequence of (b);
[0110] (d) and amino acid sequence encoded by a nucleic acid sequence hybridising with the complementary strand of a nucleic acid sequence as defined in (b) under stringent hybridisation conditions.

[0111] Preferred CD19 and CD3 binding constructs according to the invention are SEQ ID NO.:190, 192, 194 representing construct 5 and SEQ ID NO.:196, 198 and 200 representing construct 13 of Table 7 and having the three different VL regions (VL1 (SEQ ID NO.:78), VL2 (SEQ ID NO.:80), or VL3 (SEQ ID NO.:82)).

[0112] The present invention also provides for CD3 specific binding constructs comprising a first domain which specifically binds to human CD3 and has reduced propensity to generate T cell epitopes and comprising an Ig-derived second domain directed against/capable of binding to CD19, which comprise an amino acid sequence encoded by a nucleic acid sequence hybridizing with the complementary strand of a nucleic acid sequence as defined in (b) herein above, i.e. to a nucleic acid sequence as shown in any one of SEQ ID NOs.: 189, 191, 193, 195, 197, 199, 326, 328, 330, 332, 334, 336, 338, 340, 342, 344, 346, 348, 350, 352, 354, 356, 358, 360, 362, 364, 366, 368, 370, 372, 374, 376, 378, 380, 382, 384, 386, 388, 390, 392, 394, 396, 398, 400, 402, 404, 406 or 408, under stringent hybridization conditions. The terms “hybridization” and “stringent conditions” have been described herein above. The corresponding definitions and embodiments apply here mutatis mutandis.

[0113] The herein disclosed deimmunized CD3 and CD19 binding constructs are particularly useful in the prevention, treatment or amelioration of a proliferative disease, a tumorous disease, an inflammatory disease, an immunological disorder, an autoimmune disease, an infectious disease, a viral disease, allergic reactions, parasitic reactions, graft-versus-host diseases, host-versus-graft diseases or B-cell malignancies, in particular B cell non-Hodgkin's lymphoma, Hodgkin's lymphoma or B cell leukemias (e.g. B cell acute lymphoatic leukemia (B-ALL), (e.g. hairy cell lymphoma) B cell precursor acute lymphatic leukemia (pre-B-ALL), B cell chronic lymphatic leukemia (B-CLL)) leukemia.

[0114] In a further embodiment, the present invention relates to a CD3 specific binding construct as defined above comprising a first domain specifically binding to human CD3 and having reduced propensity to generate T cell epitopes and a second domain, wherein said second domain is Ig-derived and comprises an antigen-interaction site with a specificity for CD20.

[0115] CD20 is one of the cell surface proteins present on B-lymphocytes. CD20 antigen is found in normal and malignant pre-B and mature B lymphocytes, including those in over 90% of B-cell non-Hodgkin's lymphomas (NHL). The antigen is absent in hematopoetic stem cells, activated B lymphocytes (plasma cells) and normal tissue. Several antibodies mostly of murine origin have been described: 1F5 (Press et al., 1987, Blood 69/2, 584-591), 2B8/C2B8, 2H7, 1H4 (Liu et al., 1987, J Immunol 139, 3521-3526; Anderson et al., 1998, U.S. Pat. No. 5,736,137; Haisma et al., 1998, Blood 92, 184-190; Shan et al., 1999, J. Immunol. 162, 6589-6595).

[0116] CD20 has been described in immunotherapeutic strategies for the treatment of plasma cell malignancies using vaccination with DNA encoding scFv linked to carrier protein (Treon et al., 2000, Semin Oncol 27(5), 598) and in immunotherapeutic treatment using CD20 antibodies (IDEC-C2B8) have been shown to be effective in the treatment of non-Hodgkin's B-cell lymphoma. CD20 antibodies have proven efficacy and tolerability in non-Hodgkin's lymphoma, achieving response rates of 73% and 48% in previously untreated or relapsed/refractory indolent non-Hodgkin's lymphoma, respectively (Montserrat, 2003, Semin Oncol 30(1suppl2), 34-39). Furthermore, CD20 antibodies have been widely used to treat relapsing or advanced stage B-cell neoplasms with an efficacy of about 50%.

[0117] In a particularly preferred embodiment of the present invention, CD3-specific binding constructs are provided, which comprise a deimmunized domain directed against/binding to/interacting with human CD3 and a second Ig-derived domain which specifically binds to/interacts with CD20. Such constructs are shown in Tables 8A and 8B. The modules A-G in Tables 8A and 8B can be defined as mentioned above for Tables 1-5. Deimmunized VH domains of antibodies having specificity for the human CD3 antigen can be selected from the sequences as set out in SEQ ID NOs.: 74 or 76. Deimmunized VL domains of antibodies having specificity for the human CD3 antigen can be selected from the sequences as set out in SEQ ID NOs.: 78, 80 or 82. The VH protein domain of human CD20 antibody is as set out in SEQ ID NO.: 170. The VL protein domain of human CD20 antibody is as set out in SEQ ID NO.: 172. When either the module pair A/C or E/G is a pair of deimmunized VH/VL or VL/VH protein domains from an antibody having specificity for the human CD3 antigen, protein module B or F, respectively, has the amino acid sequence as set out in SEQ ID NO.: 3. When either the module pair A/C or E/G is a pair of VH/VL or VL/VH from an antibody having specificity for the CD20 antigen, protein module B or F, respectively, has the amino acid sequence as set out in SEQ ID NO.: 168. The respective groups of protein modules A-B-C and E-F-G are connected to each other through protein module D, having the sequence as set out in SEQ ID NO.: 174. However, as mentioned above an additional serine may be introduced for cloning purposes (linker as depicted in SEQ ID NO.:176) between the VL and subsequent V domain.

[0118] Nucleic acid molecules encoding deimmunized VH domains of antibodies having specificity for the human CD3 antigen can be selected from the sequences as set out in SEQ ID NOs.: 73 or 75. Nucleic acid molecules encoding deimmunized VL domains of antibodies having specificity for the human CD3 antigen can be selected from the sequences as set out in SEQ ID NOs.: 77, 79 or 81. The nucleic acid molecule encoding the VH protein domain of the human CD20 antibody is as set out in SEQ ID NO.: 169. The nucleic acid molecule encoding the VL protein domain of the human CD20 antibody is as set out in SEQ ID NO.: 171. When either the module pair A/C or EiG denotes a nucleic acid encoding a pair of deimmunized VH/VL or VL/VH protein domains from an antibody having specificity for the human CD3 antigen, nucleic acid module B or F, respectively, has the amino acid sequence as set out in SEQ ID NO.: 202. When either the module pair A/C or E/G denotes a nucleic acid encoding a pair of VH/VL or VL/VH from an antibody having specificity for the CD20 antigen, nucleic acid module B or F, respectively, has the nucleic acid sequence as set out in SEQ ID NO.: 201. The groups of nucleic acid modules A-B-C and E-F-G are connected to each other through nucleic acid module D, having the sequence as set out in SEQ ID NO.: 173. An alternative linker SEQ ID NO.:175 may also be used to conjugate VL domain with a subsequent V domain (including an additional codon encoding a serine residue for cloning purposes).

TABLE 8A
Deimmunized anti-human CD3 constructs comprising single chain anti-CD20
variable regions: amino acid sequence

| | SEQ ID NO.: in construct portion . . . | | | | | | | deimmunized anti-CD3 construct/ | Domain |
|---|---|---|---|---|---|---|---|---|---|
| Construct | A | B | C | D | E | F | G | Specificity (N -> C) | Arrangement |
| 1 | 80 | 3 | 74 | 174 | 170 | 168 | 172 | CD3 (VL2/VH5) × CD20 | LHHL |
| 2 | 74 | 3 | 80 | 174 | 170 | 168 | 172 | CD3 (VH5/VL2) × CD20 | HLHL |
| 3 | 80 | 3 | 74 | 174 | 172 | 168 | 170 | CD3 (VL2/VH5) × CD20 | LHLH |
| 4 | 74 | 3 | 80 | 174 | 172 | 168 | 170 | CD3 (VH5/VL2) × CD20 | HLLH |
| 5 | 172 | 168 | 170 | 174 | 74 | 3 | 80 | CD20 × CD3 (VH5/VL2) | LHHL |
| 6 | 170 | 168 | 172 | 174 | 74 | 3 | 80 | CD20 × CD3 (VH5/VL2) | HLHL |
| 7 | 172 | 168 | 170 | 174 | 80 | 3 | 74 | CD20 × CD3 (VL2/VH5) | LHLH |
| 8 | 170 | 168 | 172 | 174 | 80 | 3 | 74 | CD20 × CD3 (VL2/VH5) | HLLH |
| 9 | 80 | 3 | 76 | 174 | 170 | 168 | 172 | CD3 (VL2/VH7) × CD20 | LHHL |
| 10 | 76 | 3 | 80 | 174 | 170 | 168 | 172 | CD3 (VH7/VL2) × CD20 | HLHL |
| 11 | 80 | 3 | 76 | 174 | 172 | 168 | 170 | CD3 (VL2/VH7) × CD20 | LHLH |
| 12 | 76 | 3 | 80 | 174 | 172 | 168 | 170 | CD3 (VH7/VL2) × CD20 | HLLH |
| 13 | 172 | 168 | 170 | 174 | 76 | 3 | 80 | CD20 × CD3 (VH7/VL2) | LHHL |
| 14 | 170 | 168 | 172 | 174 | 76 | 3 | 80 | CD20 × CD3 (VH7/VL2) | HLHL |
| 15 | 172 | 168 | 170 | 174 | 80 | 3 | 76 | CD20 × CD3 (VL2/VH7) | LHLH |
| 16 | 170 | 168 | 172 | 174 | 80 | 3 | 76 | CD20 × CD3 (VL2/VH7) | HLLH |

TABLE 8B
Deimmunized anti-human CD3 constructs comprising single chain anti-CD20
variable regions: Nucleotide sequence

| | SEQ ID NO.: in construct portion ... | | | | | | | deimmunized anti-CD3 construct/ | Domain |
|---|---|---|---|---|---|---|---|---|---|
| Construct | A | B | C | D | E | F | G | Specificity (N -> C) | Arrangement |
| 1 | 79 | 202 | 73 | 173 | 169 | 201 | 171 | CD3 (VL2/VH5) × CD20 | LHHL |
| 2 | 73 | 202 | 79 | 173 | 169 | 201 | 171 | CD3 (VH5/VL2) × CD20 | HLHL |
| 3 | 79 | 202 | 73 | 173 | 171 | 201 | 169 | CD3 (VL2/VH5) × CD20 | LHLH |
| 4 | 73 | 202 | 79 | 173 | 171 | 201 | 169 | CD3 (VH5/VL2) × CD20 | HLLH |
| 5 | 171 | 201 | 169 | 173 | 73 | 202 | 79 | CD20 × CD3 (VH5/VL2) | LHHL |
| 6 | 169 | 201 | 171 | 173 | 73 | 202 | 79 | CD20 × CD3 (VH5/VL2) | HLHL |
| 7 | 171 | 201 | 169 | 173 | 79 | 202 | 73 | CD20 × CD3 (VL2/VH5) | LHLH |
| 8 | 169 | 201 | 171 | 173 | 79 | 202 | 73 | CD20 × CD3 (VL2/VH5) | HLLH |
| 9 | 79 | 202 | 75 | 173 | 169 | 201 | 171 | CD3 (VL2/VH7) × CD20 | LHHL |
| 10 | 75 | 202 | 79 | 173 | 169 | 201 | 171 | CD3 (VH7/VL2) × CD20 | HLHL |
| 11 | 79 | 202 | 75 | 173 | 171 | 201 | 169 | CD3 (VL2/VH7) × CD20 | LHLH |
| 12 | 75 | 202 | 79 | 173 | 171 | 201 | 169 | CD3 (VH7/VL2) × CD20 | HLLH |
| 13 | 171 | 201 | 169 | 173 | 75 | 202 | 79 | CD20 × CD3 (VH7/VL2) | LHHL |
| 14 | 169 | 201 | 171 | 173 | 75 | 202 | 79 | CD20 × CD3 (VH7/VL2) | HLHL |
| 15 | 171 | 201 | 169 | 173 | 79 | 202 | 75 | CD20 × CD3 (VL2/VH7) | LHLH |
| 16 | 169 | 201 | 171 | 173 | 79 | 202 | 75 | CD20 × CD3 (VL2/VH7) | HLLH |

[0119] More preferably, the deimmunized CD3 and CD20 binding constructs of the present invention comprises an amino acid sequence which is selected from the group consisting of
[0120] (a) an amino acid sequence as shown in any one of SEQ ID NO.: 218, 220, 222, 224, 226, or 228;
[0121] (b) an amino acid sequence encoded by a nucleic acid sequence as shown in any one of in SEQ ID NO.: 217, 219, 221, 223, 225 or 227; and
[0122] (c) an amino acid sequence encoded by a nucleic acid sequence which is degenerate as a result of the genetic code to a nucleotide sequence of (b);
[0123] (d) and amino acid sequence encoded by a nucleic acid sequence hybridizing with the complementary strand of a nucleic acid sequence as defined in (b) under stringent hybridization conditions.

[0124] The present invention also provides for CD3 specific binding constructs comprising a first domain which specifically binds to human CD3 and has reduced propensity to generate T cell epitopes and comprising an Ig-derived second domain directed against/capable of binding to CD20, which comprise an amino acid sequence encoded by a nucleic acid sequence hybridizing with the complementary strand of a nucleic acid sequence as defined in (b) herein above, i.e. to a nucleic acid sequence as shown in any one of SEQ ID NO.: 217, 219, 221, 223, 225 or 227, under stringent hybridization conditions. The terms “hybridization” and “stringent conditions” have been described herein above. The corresponding definitions and embodiments apply here mutatis mutandis.

[0125] The herein described deimmunized CD3 and CD20 binding constructs are envisaged for use in the treatment, prevention and/or amelioration of B-cell related disorders, preferably in the medical intervention of lymphoma, more preferably in the treatment of non-Hodgkin lymphoma.

[0126] The invention also provides for nucleic acid sequence encoding a CD3 specific binding molecule of the invention.

[0127] It is evident to the person skilled in the art that regulatory sequences may be added to the nucleic acid molecule of the invention. For example, promoters, transcriptional enhancers and/or sequences which allow for induced expression of the polynucleotide of the invention may be employed. A suitable inducible system is for example tetracycline-regulated gene expression as described, e.g., by Gossen and Bujard (Proc. Natl. Acad. Sci. USA 89 (1992), 5547-5551) and Gossen et al. (Trends Biotech. 12 (1994), 58-62), or a dexamethasone-inducible gene expression system as described, e.g. by Crook (1989) EMBO J. 8, 513-519.

[0128] Furthermore, it is envisaged for further purposes that nucleic acid molecules may contain, for example, thioester bonds and/or nucleotide analogues. Said modifications may be useful for the stabilization of the nucleic acid molecule against endo- and/or exonucleases in the cell. Said nucleic acid molecules may be transcribed by an appropriate vector containing a chimeric gene which allows for the transcription of said nucleic acid molecule in the cell. In this respect, it is also to be understood that such polynucleotide can be used for “gene targeting” or “gene therapeutic” approaches. In another embodiment said nucleic acid molecules are labeled. Methods for the detection of nucleic acids are well known in the art, e.g., Southern and Northern blotting, PCR or primer extension. This embodiment may be useful for screening methods for verifying successful introduction of the nucleic acid molecules described above during gene therapy approaches.

[0129] Said nucleic acid molecule(s) may be a recombinantly produced chimeric nucleic acid molecule comprising any of the aforementioned nucleic acid molecules either alone or in combination. Preferably, the nucleic acid molecule is part of a vector.

[0130] The present invention therefore also relates to a vector comprising the nucleic acid molecule described in the present invention.

[0131] Many suitable vectors are known to those skilled in molecular biology, the choice of which would depend on the function desired and include plasmids, cosmids, viruses, bacteriophages and other vectors used conventionally in genetic engineering. Methods which are well known to those skilled in the art can be used to construct various plasmids and vectors; see, for example, the techniques described in Sambrook et al. (loc cit.) and Ausubel, Current Protocols in Molecular Biology, Green Publishing Associates and Wiley Interscience, N.Y. (1989), (1994). Alternatively, the polynucleotides and vectors of the invention can be reconstituted into liposomes for delivery to target cells. As discussed in further details below, a cloning vector was used to isolate individual sequences of DNA. Relevant sequences can be transferred into expression vectors where expression of a particular polypeptide is required. Typical cloning vectors include pBluescript SK, pGEM, pUC9, pBR322 and pGBT9. Typical expression vectors include pTRE, pCAL-n-EK, pESP-1, pOP13CAT.

[0132] Preferably said vector comprises a nucleic acid sequence which is a regulatory sequence operably linked to said nucleic acid sequence encoding a bispecific single chain antibody constructs defined herein.

[0133] Such regulatory sequences (control elements) are known to the artisan and may include a promoter, a splice cassette, translation initiation codon, translation and insertion site for introducing an insert into the vector. Preferably, said nucleic acid molecule is operatively linked to said expression control sequences allowing expression in eukaryotic or prokaryotic cells.

[0134] It is envisaged that said vector is an expression vector comprising the nucleic acid molecule encoding a bispecific single chain antibody constructs defined herein.

[0135] The term “regulatory sequence” refers to DNA sequences, which are necessary to effect the expression of coding sequences to which they are ligated. The nature of such control sequences differs depending upon the host organism. In prokaryotes, control sequences generally include promoter, ribosomal binding site, and terminators. In eukaryotes generally control sequences include promoters, terminators and, in some instances, enhancers, transactivators or transcription factors. The term “control sequence” is intended to include, at a minimum, all components the presence of which are necessary for expression, and may also include additional advantageous components.

[0136] The term “operably linked” refers to a juxtaposition wherein the components so described are in a relationship permitting them to function in their intended manner. A control sequence “operably linked” to a coding sequence is ligated in such a way that expression of the coding sequence is achieved under conditions compatible with the control sequences. In case the control sequence is a promoter, it is obvious for a skilled person that double-stranded nucleic acid is preferably used.

[0137] Thus, the recited vector is preferably an expression vector. An “expression vector” is a construct that can be used to transform a selected host and provides for expression of a coding sequence in the selected host. Expression vectors can for instance be cloning vectors, binary vectors or integrating vectors. Expression comprises transcription of the nucleic acid molecule preferably into a translatable mRNA. Regulatory elements ensuring expression in prokaryotes and/or eukaryotic cells are well known to those skilled in the art. In the case of eukaryotic cells they comprise normally promoters ensuring initiation of transcription and optionally poly-A signals ensuring termination of transcription and stabilization of the transcript. Possible regulatory elements permitting expression in prokaryotic host cells comprise, e.g., the P_{L}, lac, trp or tac promoter in E. coli, and examples of regulatory elements permitting expression in eukaryotic host cells are the AOX1 or GAL1 promoter in yeast or the CMV-, SV40-, RSV-promoter (Rous sarcoma virus), CMV-enhancer, SV40-enhancer or a globin intron in mammalian and other animal cells.

[0138] Beside elements which are responsible for the initiation of transcription such regulatory elements may also comprise transcription termination signals, such as the SV40-poly-A site or the tk-poly-A site, downstream of the polynucleotide. Furthermore, depending on the expression system used leader sequences capable of directing the polypeptide to a cellular compartment or secreting it into the medium may be added to the coding sequence of the recited nucleic acid sequence and are well known in the art; see also, e.g., appended example 1. The leader sequence(s) is (are) assembled in appropriate phase with translation, initiation and termination sequences, and preferably, a leader sequence capable of directing secretion of translated protein, or a portion thereof, into the periplasmic space or extracellular medium. Optionally, the heterologous sequence can encode a fusion protein including an N-terminal identification peptide imparting desired characteristics, e.g., stabilization or simplified purification of expressed recombinant product; see supra. In this context, suitable expression vectors are known in the art such as Okayama-Berg cDNA expression vector pcDV1 (Pharmacia), pCDM8, pRc/CMV, pcDNA1, pcDNA3 (In-vitrogene), PEF-DHFR, pEF-ADA or pEF-neo (Raum et al. Cancer Immunol Immunother (2001) 50(3), 141-150) or pSPORT1 (GIBCO BRL).

[0139] Preferably, the expression control sequences will be eukaryotic promoter systems in vectors capable of transforming of transfecting eukaryotic host cells, but control sequences for prokaryotic hosts may also be used. Once the vector has been incorporated into the appropriate host, the host is maintained under conditions suitable for high level expression of the nucleotide sequences, and as desired, the collection and purification of the polypeptide of the invention may follow; see, e.g., the appended examples.

[0140] An alternative expression system which could be used is an insect system. In one such system, Autographa californica nuclear polyhedrosis virus (AcNPV) is used as a vector to express foreign genes in Spodoptera frugiperda cells or in Trichoplusia larvae. The coding sequence of a recited nucleic acid molecule may be cloned into a nonessential region of the virus, such as the polyhedrin gene, and placed under control of the polyhedrin promoter. Successful insertion of said coding sequence will render the polyhedrin gene inactive and produce recombinant virus lacking coat protein coat. The recombinant viruses are then used to infect S. frugiperda cells or Trichoplusia larvae in which the protein of the invention is expressed (Smith, J. Virol. 46 (1983), 584; Engelhard, Proc. Nat. Acad. Sci. USA 91 (1994), 3224-3227).

[0141] Additional regulatory elements may include transcriptional as well as translational enhancers. Advantageously, the above-described vectors of the invention comprises a selectable and/or scorable marker.

[0142] Selectable marker genes useful for the selection of transformed cells and, e.g., plant tissue and plants are well known to those skilled in the art and comprise, for example, antimetabolite resistance as the basis of selection for dhfr, which confers resistance to methotrexate (Reiss, Plant Physiol. (Life Sci. Adv.) 13 (1994), 143-149); npt, which confers resistance to the aminoglycosides neomycin, kanamycin and paromycin (Herrera-Estrella, EMBO J. 2 (1983), 987-995) and hygro, which confers resistance to hygromycin (Marsh, Gene 32 (1984), 481-485). Additional selectable genes have been described, namely trpB, which allows cells to utilize indole in place of tryptophan; hisD, which allows cells to utilize histinol in place of histidine (Hartman, Proc. Natl. Acad. Sci. USA 85 (1988), 8047); mannose-6-phosphate isomerase which allows cells to utilize mannose (WO 94/20627) and ODC (ornithine decarboxylase) which confers resistance to the ornithine decarboxylase inhibitor, 2-(difluoromethyl)-DL-ornithine, DFMO (McConlogue, 1987, In: Current Communications in Molecular Biology, Cold Spring Harbor Laboratory ed.) or deaminase from Aspergillus terreus which confers resistance to Blasticidin S (Tamura, Biosci. Biotechnol. Biochem. 59 (1995), 2336-2338).

[0143] Useful scorable markers are also known to those skilled in the art and are commercially available. Advantageously, said marker is a gene encoding luciferase (Giacomin, PI. Sci. 116 (1996), 59-72; Scikantha, J. Bact. 178 (1996), 121), green fluorescent protein (Gerdes, FEBS Lett. 389 (1996), 44-47) or β-glucuronidase (Jefferson, EMBO J. 6 (1987), 3901-3907). This embodiment is particularly useful for simple and rapid screening of cells, tissues and organisms containing a recited vector.

[0144] As described above, the recited nucleic acid molecule can be used alone or as part of a vector to express the encoded CD3 specific construct in cells, for, e.g., purification but also for gene therapy purposes. The nucleic acid molecules or vectors containing the DNA sequence(s) encoding any one of the above described (bispecific) CD3 constructs is introduced into the cells which in turn produce the polypeptide of interest. Gene therapy, which is based on introducing therapeutic genes into cells by ex-vivo or in-vivo techniques is one of the most important applications of gene transfer. Suitable vectors, methods or gene-delivery systems for in-vitro or in-vivo gene therapy are described in the literature and are known to the person skilled in the art; see, e.g., Giordano, Nature Medicine 2 (1996), 534-539; Schaper, Circ. Res. 79 (1996), 911-919; Anderson, Science 256 (1992), 808-813; Verma, Nature 389 (1994), 239; Isner, Lancet 348 (1996), 370-374; Muhlhauser, Circ. Res. 77 (1995), 1077-1086; Onodera, Blood 91 (1998), 30-36; Verma, Gene Ther. 5 (1998), 692-699; Nabel, Ann. N.Y. Acad. Sci. 811 (1997), 289-292; Verzeletti, Hum. Gene Ther. 9 (1998), 2243-51; Wang, Nature Medicine 2 (1996), 714-716; WO 94/29469; WO 97/00957, U.S. Pat. No. 5,580,859; U.S. Pat. No. 5,589,466; or Schaper, Current Opinion in Biotechnology 7 (1996), 635-640. The recited nucleic acid molecules and vectors may be designed for direct introduction or for introduction via liposomes, or viral vectors (e.g., adenoviral, retroviral) into the cell. Preferably, said cell is a germ line cell, embryonic cell, or egg cell or derived therefrom, most preferably said cell is a stem cell. An example for an embryonic stem cell can be, inter alia, a stem cell as described in, Nagy, Proc. Natl. Acad. Sci. USA 90 (1993), 8424-8428.

[0145] In accordance with the above, the present invention relates to methods to derive vectors, particularly plasmids, cosmids, viruses and bacteriophages used conventionally in genetic engineering that comprise a nucleic acid molecule encoding the polypeptide sequence of a bispecific single chain antibody construct defined herein. Preferably, said vector is an expression vector and/or a gene transfer or targeting vector. Expression vectors derived from viruses such as retroviruses, vaccinia virus, adeno-associated virus, herpes viruses, or bovine papilloma virus, may be used for delivery of the recited polynucleotides or vector into targeted cell populations. Methods which are well known to those skilled in the art can be used to construct recombinant vectors; see, for example, the techniques described in Sambrook et al. (loc cit.), Ausubel (1989, loc cit.) or other standard text books. Alternatively, the recited nucleic acid molecules and vectors can be reconstituted into liposomes for delivery to target cells. The vectors containing the nucleic acid molecules of the invention can be transferred into the host cell by well-known methods, which vary depending on the type of cellular host. For example, calcium chloride transfection is commonly utilized for prokaryotic cells, whereas calcium phosphate treatment or electroporation may be used for other cellular hosts; see Sambrook, supra.

[0146] The recited vector may, inter alia, be the pEF-DHFR, pEF-ADA or pEF-neo. The vectors pEF-DHFR, pEF-ADA and pEF-neo have been described in the art, e.g. in Mack et al. (PNAS (1995) 92, 7021-7025) and Raum et al. (Cancer Immunol Immunother (2001) 50(3), 141-150).

[0147] The invention also provides for a host transformed or transfected with a vector as described herein. Said host may be produced by introducing said at least one of the above described vector or at least one of the above described nucleic acid molecules into the host. The presence of said at least one vector or at least one nucleic acid molecule in the host may mediate the expression of a gene encoding the above described bispecific single chain antibody constructs.

[0148] The described nucleic acid molecule or vector which is introduced in the host may either integrate into the genome of the host or it may be maintained extrachromosomally.

[0149] The host can be any prokaryotic or eukaryotic cell.

[0150] The term “prokaryote” is meant to include all bacteria which can be transformed or transfected with DNA or RNA molecules for the expression of a protein of the invention. Prokaryotic hosts may include gram negative as well as gram positive bacteria such as, for example, E. coli, S. typhimurium, Serratia marcescens and Bacillus subtilis. The term “eukaryotic” is meant to include yeast, higher plant, insect and preferably mammalian cells. Depending upon the host employed in a recombinant production procedure, the protein encoded by the polynucleotide of the present invention may be glycosylated or may be non-glycosylated. Especially preferred is the use of a plasmid or a virus containing the coding sequence of the polypeptide of the invention and genetically fused thereto an N-terminal FLAG-tag and/or C-terminal His-tag. Preferably, the length of said FLAG-tag is about 4 to 8 amino acids, most preferably 8 amino acids. An above described polynucleotide can be used to transform or transfect the host using any of the techniques commonly known to those of ordinary skill in the art. Furthermore, methods for preparing fused, operably linked genes and expressing them in, e.g., mammalian cells and bacteria are well-known in the art (Sambrook, loc cit.).

[0151] Preferably, said the host is a bacteria, an insect, fungal, plant or animal cell.

[0152] It is particularly envisaged that the recited host may be a mammalian cell, more preferably a human cell or human cell line.

[0153] Particularly preferred host cells comprise CHO cells, COS cells, myeloma cell lines like SP2/0 or NS/0. As illustrated in the appended examples, particularly preferred are CHO-cells as hosts.

[0154] In a further embodiment, the present invention thus relates to a process for the preparation of a CD3 specific construct described above comprising cultivating a cell and/or the host of the invention under conditions suitable for the expression of said construct and isolating the construct from the cell or the culture medium.

[0155] The transformed hosts can be grown in fermentors and cultured according to techniques known in the art to achieve optimal cell growth. The polypeptide of the invention can then be isolated from the growth medium, cellular lysates, or cellular membrane fractions. The isolation and purification of the, e.g., microbially expressed polypeptides of the invention may be by any conventional means such as, for example, preparative chromatographic separations and immunological separations such as those involving the use of monoclonal or polyclonal antibodies directed, e.g., against a tag of the polypeptide of the invention or as described in the appended examples.

[0156] Furthermore, the invention provides for a composition comprising a (human) CD3-specific binding construct as defined herein or a (human) CD3-specific binding construct as produced by the process disclosed above, a nucleic acid molecule of the invention, a vector or a host of the invention. Said composition may, optionally, also comprise a proteinaceous compound capable of providing an activation signal for immune effector cells. Most preferably, said composition is a pharmaceutical composition further comprising, optionally, suitable formulations of carrier, stabilizers and/or excipients.

[0157] In accordance with this invention, the term “pharmaceutical composition” relates to a composition for administration to a patient, preferably a human patient. In a preferred embodiment, the pharmaceutical composition comprises a composition for parenteral, transdermal, intraluminal, intra arterial, intrathecal administration or by direct injection into the tissue or tumour. It is in particular envisaged that said pharmaceutical composition is administered to a patient via infusion or injection. Administration of the suitable compositions may be effected by different ways, e.g., by intravenous, intraperitoneal, subcutaneous, intramuscular, topical or intradermal administration. The pharmaceutical composition of the present invention may further comprise a pharmaceutically acceptable carrier. Examples of suitable pharmaceutical carriers are well known in the art and include phosphate buffered saline solutions, water, emulsions, such as oil/water emulsions, various types of wetting agents, sterile solutions, etc. Compositions comprising such carriers can be formulated by well known conventional methods. These pharmaceutical compositions can be administered to the subject at a suitable dose. The dosage regimen will be determined by the attending physician and clinical factors. As is well known in the medical arts, dosages for any one patient depends upon many factors, including the patient's size, body surface area, age, the particular compound to be administered, sex, time and route of administration, general health, and other drugs being administered concurrently. Generally, the regimen as a regular administration of the pharmaceutical composition should be in the range of 1 μg to 5 g units per day. However, a more preferred dosage for continuous infusion might be in the range of 0.01 μg to 2 mg, preferably 0.01 μg to 1 mg, more preferably 0.01 μg to 100 μg, even more preferably 0.01 μg to 50 μg and most preferably 0.01 μg to 10 μg units per kilogram of body weight per hour. Particularly preferred dosages are recited herein below. Progress can be monitored by periodic assessment. Dosages will vary but a preferred dosage for intravenous administration of DNA is from approximately 10⁶ to 10¹² copies of the DNA molecule. The compositions of the invention may be administered locally or systematically. Administration will generally be parenterally, e.g., intravenously; DNA may also be administered directed to the target site, e.g., by biolistic delivery to an internal or external target site or by catheter to a site in an artery. Preparations for parenteral administration include sterile aqueous or non-aqueous solutions, suspensions, and emulsions. Examples of non-aqueous solvents are propylene glycol, polyethylene glycol, vegetable oils such as olive oil, and injectable organic esters such as ethyl oleate. Aqueous carriers include water, alcoholic/aqueous solutions, emulsions or suspensions, including saline and buffered media. Parenteral vehicles include sodium chloride solution, Ringer's dextrose, dextrose and sodium chloride, lactated Ringer's, or fixed oils. Intravenous vehicles include fluid and nutrient replenishes, electrolyte replenishers (such as those based on Ringer's dextrose), and the like. Preservatives and other additives may also be present such as, for example, antimicrobials, anti-oxidants, chelating agents, and inert gases and the like. In addition, the pharmaceutical composition of the present invention might comprise proteinaceous carriers, like, e.g., serum albumine or immunoglobuline, preferably of human origin. It is envisaged that the pharmaceutical composition of the invention might comprise, in addition to the proteinaceous bispecific single chain antibody constructs or nucleic acid molecules or vectors encoding the same (as described in this invention), further biologically active agents, depending on the intended use of the pharmaceutical composition. Such agents might be drugs acting on the gastro-intestinal system, drugs acting as cytostatica, drugs preventing hyperurikemia, drugs inhibiting immunereactions (e.g. corticosteroids), drugs acting on the circulatory system and/or agents such as T-cell co-stimulatory molecules or cytokines known in the art.

[0158] Possible indications for administration of the composition(s) of the invention are tumorous diseases especially epithelial cancers/carcinomas such as breast cancer, colon cancer, prostate cancer, head and neck cancer, skin cancer (melanoma), cancers of the genito-urinary tract, e.g. ovarial cancer, endometrial cancer, cervix cancer and kidney cancer, lung cancer, gastric cancer, cancer of the small intestine, liver cancer, pancreas cancer, gall bladder cancer, cancers of the bile duct, esophagus cancer, cancer of the salivatory glands and cancer of the thyroid gland or other tumorous diseases like haematological tumors, gliomas, sarcomas or osteosarcomas. The administration of the composition(s) of the invention is especially indicated for minimal residual disease, preferably early solid tumors, advanced solid tumors or metatatic solid tumors, which is characterized by the local and non-local reoccurrance of the tumor caused by the survival of single cells.

[0159] The invention further envisages the co-administration protocols with other compounds, e.g. molecules capable of providing an activation signal for immune effector cells, for cell proliferation or for cell simulation. Said molecule may be, e.g. a further primary activation signal for T cells (e.g. a further costimulatory molecule: molecules of B7 family, O×40 L, 4.1 BBL), or a further cytokine: interleukin (e.g. IL-2) or NKG-2D engaging compound.

[0160] The composition of the invention as described above may also be a diagnostic composition further comprising, optionally, means and methods for detection.

[0161] The CD3-specific constructs provided herein are also suited for use in immunoassays in which they can be utilized in liquid phase or bound to a solid phase carrier. Examples of immunoassays which can utilize the polypeptide of the invention are competitive and non-competitive immunoassays in either a direct or indirect format. Examples of such immunoassays are the enzyme linked immunosorbent assay (ELISA), enzyme immunoassay (EIA), radioimmunoassay (RIA), the sandwich (immunometric assay) and the Western blot assay.

[0162] The CD3 specific binding constructs of the invention can be bound to many different carriers and used to isolate cells specifically bound to said polypeptides. Examples of well-known carriers include glass, polystyrene, polyvinyl chloride, polypropylene, polyethylene, polycarbonate, dextran, nylon, amyloses, natural and modified celluloses; polyacrylamides, agaroses, and magnetite. The nature of the carrier can be either soluble or insoluble, e.g. as beads, for the purposes of the invention.

[0163] There are many different labels and methods of labeling known to those of ordinary skill in the art. Examples of the types of labels which can be used in the present invention include enzymes, radioisotopes, colloidal metals, fluorescent compounds, chemiluminescent compounds, and bioluminescent compounds; see also the embodiments discussed hereinabove.

[0164] In a most preferred embodiment of the present invention, the use of a CD3 specific binding molecule of the invention, of a vector or of a host of the invention for the preparation of a pharmaceutical composition is envisaged. Said pharmaceutical composition may be employed in the prevention, treatment or amelioration of a proliferative disease, a tumorous disease, an inflammatory disease, an immunological disorder, an autoimmune disease, an infectious disease, viral disease, allergic reactions, parasitic reactions, graft-versus-host diseases or host-versus-graft diseases.

[0165] Furthermore, in accordance to the invention, the deimmunized constructs comprising CD19 and CD3 binding domains, preferably SEQ ID NO.:190, 192, 194, 196, 198, 200, 327, 329, 331, 333, 335, 337, 339, 341, 343, 345, 347, 349, 351, 353, 357, 359, 361, 363, 365, 367, 369, 371, 373, 375, 377, 379, 381, 383, 385, 387, 389, 391, 393, 395, 397, 399, 401, 403, 405, 407 or 409, can be used for the treatment of immunological disorders (various B cell malignancies) or autoimmune diseases, the deimmunized constructs comprising CCR5 and CD3 binding domains, preferably SEQ ID NO.:206, 208, 210, 212, 214 or 216, can be used for the treatment of viral diseases (HIV), autoimmune diseases and/or of inflammatory diseases (like rheumatoid arthritis), the deimmunized constructs comprising CD20 and CD3 binding domains, preferably SEQ ID NO.:218, 220, 222, 224, 226, 228, can be used for the treatment of tumorous diseases, preferably lymphoma, more preferably non-Hodgkin's B-cell lymphoma and the deimmunized constructs comprising EpCAM and CD3 binding domains, preferably SEQ ID NO.:31, 33, 35, 37, 39, 49, 55, 58, 61, 63, 65, 67, 237, 239, 241, 243, 245, 247, 249, 251, 253, 255, 257, 259, 261, 263, 265, 267, 269, 271, 273, 275, 277, 279, 281, 283, 285, 287, 289, 291, 293, 295, 297, 299, 301, 303, 305, 307, 309, 311, 313, 315, 317, 319, 321, 323 or 325 can be used for the treatment of tumorous diseases, preferably epithelial cancers.

[0166] The invention also relates to a method for the prevention, treatment or amelioration of a proliferative disease, a tumorous disease, an inflammatory disease, an immunological disorder, an autoimmune disease, an infectious disease, viral disease, allergic reactions, parasitic reactions, graft-versus-host diseases or host-versus-graft diseases comprising the administration of a (bispecific) CD3 specific binding molecule of the invention or a (bispecific) CD3 specific binding molecule as produced by the process described herein, of a nucleic acid molecule, a vector or a host of the invention to a subject in need of such a prevention, treatment or amelioration. Preferably, said subject is a human.

[0167] The method for the prevention, treatment or amelioration may also, in addition, comprise the administration of a proteinaceous compound capable of providing an activation signal for immune effector cells. Said proteinaceous compound may be administered simultaneously or non-simultaneously with the CD3 binding molecule, a nucleic acid molecule, a vector or a host of the invention. The proteinaceous compound may, inter alia, selected from the group consisting of a further costimulatory molecule:molecules of B7 family, O×40 L, 4.1 BBL), or a further cytokine: interleukin (e.g. IL-2) or NKG-2D engaging compounds.

[0168] Finally, the invention provides for a kit comprising the CD3 specific binding molecule, a nucleic acid molecule, a vector or a host of the invention.

[0169] Said kit is particularly useful in the preparation of the pharmaceutical composition of the present invention and may, inter alia, consist of a container useful for injections or infusions. Advantageously, the kit of the present invention further comprises, optionally (a) buffer(s), storage solutions and/or remaining reagents or materials required for the conduct of medical or scientific purposes. Furthermore, parts of the kit of the invention can be packaged individually in vials or bottles or in combination in containers or multicontainer units. The kit of the present invention may be advantageously used, inter alia, for carrying out the method of the invention and could be employed in a variety of applications referred herein, e.g., as research tools or medical tools. The manufacture of the kits preferably follows standard procedures which are known to the person skilled in the art.

[0170] These and other embodiments are disclosed and encompassed by the description and Examples of the present invention. Further literature concerning any one of the antibodies, methods, uses and compounds to be employed in accordance with the present invention may be retrieved from public libraries and databases, using for example electronic devices. For example, the public database “Medline”, available on the Internet, may be utilized, for example under http://www.ncbi.nim.nih.gov/PubMed/medline.html. Further databases and addresses, such as http://www.ncbi.nim.nih.gov/, http://www.infobiogen.fr/, http://www.fmi.ch/biology/research tools.html, http://www.tiqr.org/, are known to the person skilled in the art and can also be obtained using, e.g., http://www.lycos.com.

[0171] The figures show:

[0172] FIG. 1. DNA and amino acid sequences of the non-deimmunized anti-CD3 cassette (SEQ ID NOs.: 1 and 2).

[0173] FIG. 2. A) Amino acid sequences of the heavy chains VH2 (SEQ ID NO.:70), VH3 (SEQ ID NO.:72), VH5 (SEQ ID NO.:74) and VH7 (SEQ ID NO.:76) and light chains VL1 (SEQ ID NO.:78), VL2 (SEQ ID NO.:80) and VL3 (SEQ ID NO.:82), respectively, B) Nucleotide sequences of the heavy chains VH2 (SEQ ID NO.:69), VH3 (SEQ ID NO.:71), VH5 (SEQ ID NO.:73) and VH7 (SEQ ID NO.:75) and light chains VL1 (SEQ ID NO.:77), VL2 (SEQ ID NO.:79) and VL3 (SEQ ID NO.:81), respectively, C) Amino acid sequences of the CDRs 1, 2 and 3 of the heavy chains of the non-deimmunized anti-CD3 (SEQ ID NO.:84, 90, 96, respectively), VH2 (SEQ ID NO.:86, 94, 96, respectively), VH3 (SEQ ID NO.:86, 94, 96, respectively), VH5 (SEQ ID NO.:88, 92, 96, respectively) and VH7 (SEQ ID NO.:88, 90, 96, respectively) and of the light chains of the non-deimmunized anti-CD3 (SEQ ID NO.:98, 102, 104, respectively), chains VL1 (SEQ ID NO.:100, 102, 104, respectively), VL2 (SEQ ID NO.:100, 102, 104, respectively) and VL3 (SEQ ID NO.:98, 102, 104, respectively) and D) Nucleotide sequences of the CDRs 1, 2 and 3 of the heavy chains of the non-deimmunized anti-CD3 (SEQ ID NO.:83, 89, 95, respectively), VH2 (SEQ ID NO.:85, 93, 95, respectively), VH3 (SEQ ID NO.:85, 93, 95, respectively), VH5 (SEQ ID NO.:87, 91, 95, respectively) and VH7 (SEQ ID NO.:87, 89, 95, respectively) and of the light chains of the non-deimmunized anti-CD3 (SEQ ID NO.:97, 101, 103, respectively), chains VL1 (SEQ ID NO.:99, 101, 103, respectively), VL2 (SEQ ID NO.:99, 101, 103, respectively) and VL3 (SEQ ID NO.:97, 101, 103, respectively).

[0174] FIG. 3. A) Nucleotide sequence of anti-CD3 (VH2/VL1) (SEQ ID NO.:4) B) Amino acid sequence of anti-CD3 (VH2/VL1) (SEQ ID NO.:5) C) Nucleotide sequence of anti-CD3 (VH2/VL2) (SEQ ID NO.:6) D) Amino acid sequence of anti-CD3 (VH2/VL2) (SEQ ID NO.:7) E) Nucleotide sequence of anti-CD3 (VH2/VL3) (SEQ ID NO.:8) F) Amino acid sequence of anti-CD3 (VH2/VL3) (SEQ ID NO.:9).

[0175] FIG. 4. A) Nucleotide sequence of anti-CD3 (VH3/VL1) (SEQ ID NO.:10) B) Amino acid sequence of anti-CD3 (VH3/VL1) (SEQ ID NO.:11) C) Nucleotide sequence of anti-CD3 (VH3/VL2) (SEQ ID NO.:12) D) Amino acid sequence of anti-CD3 (VH3/VL2) (SEQ ID NO.:13) E) Nucleotide sequence of anti-CD3 (VH3/VL3) (SEQ ID NO.:14) F) Amino acid sequence of anti-CD3 (VH3/VL3) (SEQ ID NO.:15).

[0176] FIG. 5. A) Nucleotide sequence of anti-CD3 (VH5/VL1) (SEQ ID NO.:16) B) Amino acid sequence of anti-CD3 (VH5/VL1) (SEQ ID NO.:17) C) Nucleotide sequence of anti-CD3 (VH5/VL2) (SEQ ID NO.:18) D) Amino acid sequence of anti-CD3 (VH5×VL2) (SEQ ID NO.:19) E) Nucleotide sequence of anti-CD3 (VH5/VL3) (SEQ ID NO.:20) F) Amino acid sequence of anti-CD3 (VH5/VL3) (SEQ ID NO.:21).

[0177] FIG. 6. A) Nucleotide sequence of anti-CD3 (VH7/VL1) (SEQ ID NO.:22) B) Amino acid sequence of anti-CD3 (VH7×VL1) (SEQ ID NO.:23) C) Nucleotide sequence of anti-CD3 (VH7/VL2) (SEQ ID. NO.:24) D) Amino acid sequence of anti-CD3 (VH7×VL2) (SEQ ID NO.:25) E) Nucleotide sequence of anti-CD3 (VH7/VL3) (SEQ ID NO.:26) F) Amino acid sequence of anti-CD3 (VH7/VL3) (SEQ ID NO.:27).

[0178] FIG. 7. Binding of bispecific anti-CD19 constructs with different deimmunized anti-CD3 parts: the anti-CD3 (VH2/VL1) (SEQ ID NO.:178), anti-CD3 (VH2/VL2) (SEQ ID NO.:180), anti-CD3 (VH2/VL3) (SEQ ID NO.:182), anti-CD3 (VH3/VL1) (SEQ ID NO.:184), anti-CD3 (VH3/VL2) (SEQ ID NO.:186), anti-CD3 (VH3/VL3) (SEQ ID NO.:188), anti-CD3 (VH5/VL1) (SEQ ID NO.:190), anti-CD3 (VH5/VK2) (SEQ ID NO.:192), anti-CD3 (VH5/VL3) (SEQ ID NO.:194), anti-CD3 (VH7/VL1) (SEQ ID NO.:196), anti-CD3 (VH7/VL2) (SEQ ID NO.:198), anti-CD3 (VH7/VL3) (SEQ ID NO.:200) A) CD3 and B) CD19. Binding was measured by a FACS-based assay using CD3 enriched PBMCs (A) or CD19-positive NALM-cells (B). CD3 and a secondary FITC labeled anti-mouse Ig antibody was used as a negative control in (A) and CD19 and a secondary FITC labeled anti-mouse Ig antibody was used as a negative control in (B). Constructs anti-CD19×anti-CD3 and anti-EpCAM (M79)×anti-CD3 were used as controls. MFI indicates mean fluorescence intensity.

[0179] FIG. 8: A representative elution pattern of a deimmunized variant of anti-CD19×anti-CD3 protein fraction from a HCIC column at 280 nm. The bottom line showing a major step at 700 ml indicates the theoretical gradient of the elution buffer containing 20 mM acetate, pH3.5. High adsorption at 280 nm was due to non-bound protein in the column flow-through. The arrow at 810,98 ml indicates the eluted deimmunized anti-CD3 fraction.

[0180] FIG. 9: A representative elution pattern of a deimmunized variant of anti-CD19×anti-CD3 protein fraction from a Ni-Chelating His Trap® column at 280 nm. The bottom line showing a first step at 85 ml and a second major step at 90 ml indicates the theoretical gradient of the elution buffer (dotted line). The arrow at 93,16 ml indicates the protein fraction containing the antiCD19×antiCD3 construct.

[0181] FIG. 10: A representative protein elution pattern from a Sephadex S200 gelfiltration column. Fractions were collected from 0-130 ml retention time. The protein peak at 80.44 ml corresponds to a MW of ca. 52 kD and contains the deimmunized antiCD19×antiCD3 construct.

[0182] FIG. 11: A) SDS-PAGE analysis of deimmunized variants of anti-CD19×anti-CD3 protein fractions. Lane M: Molecular weight marker Lane 1: HCIC flowthrough; lane 2: cell culture supernatant; lane 3: HCIC eluate; lane 4: IMAC flowthrough; lane 5: IMAC wash; lane 6: IMAC eluate; lane 7: gel filtration eluate;

[0183] B) Western blot analysis of purified deimmunized variants of anti-CD19×anti-CD3 protein fractions. Western blot analysis of purified bispecific protein was performed with antibodies directed against the His-Tag (PentaHis, Qiagen) and goat anti mouse Ig labeled with alkaline phosphatase. Lane M: Molecular weight marker Lane 1: HCIC flow through; lane 2: cell culture supernatant; lane 3: HCIC eluate; lane 4: IMAC flow through; lane 5: IMAC wash; lane 6: IMAC eluate; lane 7: gel filtration eluate.

[0184] FIG. 12. Binding of the purified bispecific anti-CD19 constructs with different deimmunized anti-CD3 parts: anti-CD3 (VH5/VL1) (SEQ ID NO.:190), anti-CD3 (VH7/VL1) (SEQ ID NO.:196), anti-CD3 (VH7/VL2) (SEQ ID NO.:198) and anti-CD3 (VH7/VL3) (SEQ ID NO.:200) to A) CD3 and B) CD19 compared to the wild-type anti-CD19×anti-CD3 construct. Binding was measured by a FACS-based assay using CD3 enriched PBMCs (A) or CD19-positive NALM-cells (B). A secondary antibody with CD3 positive cells was used as a negative control in (A) and a secondary antibody with CD19 positive cells was used as a negative control in (B). Constructs anti-CD19×anti-CD3 and anti-EpCAM (M79)×anti-CD3 were used as controls. Assay was carried out with concentrations of 1 μg/ml and 5 μg/ml. MFI indicates mean fluorescence intensity.

[0185] FIG. 13. Cytotoxicity assay of bispecific anti-CD19 constructs with different deimmunized anti-CD3 parts anti-CD3 (VH5/VL1) (SEQ ID NO.:190), anti-CD3 (VH5/VL2) (SEQ ID NO.:192), anti-CD3 (VH5/VL3) (SEQ ID NO.:194), anti-CD3 (VH7/VL1) (SEQ ID NO.:196), anti-CD3 (VH7/VL2) (SEQ ID NO.:198) and anti-CD3 (VH7/VK3) (SEQ ID NO.:200) compared to control.

[0186] FIG. 14. Sequence alignment of variable heavy region of the non-deimmunized CD3 antibody, VH5 (SEQ ID NO.:74), VH7 (SEQ ID NO.:76), VH2 (SEQ ID NO.:70) and VH3 (SEQ ID NO.:72). Framework region 1 (FR1), complementarity determining region 1 (CDR1), Framework region 1 (FR1), complementarity determining region 2 (CDR2), Framework region 3 (FR3), complementarity determining region 3 (CDR3) and Framework region 4 (FR4) have been depicted. The sequence LAR and VKK in FR1, the sequence ASGYTF and ASGYTA at the transition of framework I region to CDR1 region and the sequence LTTDK, ITTDK and MTTDT at FR3 and the sequence MQLS, MELS and LQMN at FR3 have been boxed. Alignment was carried out using the AlingnX program of Vector NTI Advance (Informax, Inc., USA).

[0187] FIG. 15. Binding analysis of bispecific anti EpCAM constructs with different deimmunized anti-CD3 parts: anti-CD3 (VH5/VL2)×5-10 (SEQ ID NO.:37) (A), deimmunized anti-CD3 (VH5/VL2)ₓ₄-7 (SEQ ID NO.:33), (B) deimmunized anti-CD3 (VH5/VL2)×3-1 (SEQ ID NO.:31) (C), deimmunized anti-CD3 (VH5/VL2)ₓ₄-7 (VL-VH) (SEQ ID NO.:35) (D) and deimmunized anti-CD3 (VH5/VL2)ₓ₅-10 (VL-VH) (SEQ ID NO.:39) (E) in CD3-positive Jurkat and EpCAM-positive Kato III cells with a FACS-based assay. A shift to the right shows binding. In Jurkat cells the dotted line indicates the shift of the negative control (only secondary antibody), dashed line shows the binding of an anti-EpCAM-anti-CD3 control antibody, the bold line shows the bispecific construct of interest. In the binding assay using EpCAM-positive Kato III-cells instead of monoclonal antibody to CD3 a monoclonal antibody to EpCAM was used as a positive control.

[0188] FIG. 16. Binding analysis of bispecific anti EpCAM constructs with different deimmunized anti-CD3 parts: 3-1×anti-CD3 (VH5/VL2) (SEQ ID NO.:49) (A) and 5-10×anti-CD3 (VH5/VL2) (SEQ ID NO.:63) (B) in CD3-positive Jurkat cells and in EpCAM-positive Kato cells with a FACS based assay. A shift to the right shows binding.

[0189] FIG. 17. Cytotoxicity assay of EpCAM constructs with deimmunized anti-CD3 parts (di anti-CD3) at N-terminal position anti-Cb3 (VH5/VL2)×3-1 (SEQ ID NO.:31), anti-CD3 (VH5/VL2)ₓ-5-10 (SEQ ID NO.:37) and anti-CD3 (VH5/VL2)ₓ₄-7 (SEQ ID NO.:33) compared to the corresponding non-deimmunized constructs. CB15 T cell clone and CHO-EpCAM cells were used in an E:T ratio of 5:1. CHO-EpCAM cell were stained with PKH26 dye and the cells were counted after bispecific single chain antibody incubation with FACS analysis.

[0190] FIG. 18. Cytotoxicity assay of EpCAM constructs with deimmunized anti-CD3 parts at the C-terminal position 3-1×anti-CD3 (VH5/VL2) (SEQ ID NO.:49) and 5-10×anti-CD3 (VH5/VL2) (SEQ ID NO.:63) compared to the corresponding non-deimmunized wild-type constructs. Cytotoxicity assay was carried out identically to FIG. 17.

[0191] The following Examples illustrate the invention:

[0192] In the following examples a number of single chain anti-human CD3 antibodies have been engineered to show reduced immunogenicity in man. The different deimmunized anti-human CD3 antibodies comprise 12 combinations of 4 different VH (VH2 (SEQ ID NO.:69, 70), VH3 (SEQ ID NO.:71, 72), VH5 (SEQ ID NO.:73, 74) and VH7 (SEQ ID NO.:75, 76)) and 3 different VL (VL1 (SEQ ID NO.:77, 78), VL2 (SEQ ID NO.:79, 80) and VL3 (SEQ ID NO.:81, 82)) regions joined together. The amino acid and nucleic acid sequences of the above-mentioned VH and VL regions are shown in FIGS. 3-6. Illustratively, the deimmunized anti-CD3 single chain antibodies were combined with an anti-CD19 single chain antibody or with an anti-EpCAM single chain antibody in order to form a bispecific product.

### EXAMPLE 1

### Cloning and Expression of Deimmunized Anti-CD3 Constructs

[0193] 1.1. Transfer of cDNA Encoding Single Chain Antibody

[0194] The DNA encoding the anti-CD3 single-chain antibody, which was deimmunized, is referred herein as the anti-CD3 cassette. This anti-CD3 cassette consists of a SGGGGS linker (SEQ ID NO.:176), the anti-CD3 VH region (SEQ ID NO.:110), a 14 amino acid GS linker (VEGGSGGSGGSGGSGGVD linker (SEQ ID NO.:68)), and the anti-CD3 VL chains region (SEQ ID NO.:112) followed by 6 histidine residues. The afore-mentioned DNA was cloned into the vector p-PCR-Script-Amp SK(+) (Stratagene) at the Srf1 site. The DNA and amino acid sequence of the anti-CD3 cassette is shown in SEQ ID NO.:1, SEQ ID NO.:2 and FIG. 1.

### 1.2 Computer Analysis of Sequences for Immunogenic T Cell Epitopes and Design of Deimmunized Single Chain Antibody Sequences

[0195] The amino acid sequence of the anti-CD3 cassette (SEQ ID NO.:2) was analyzed by peptide threading program to identify potential T cell epitopes with the method as described in WO 98/52976. SEQ ID NO.3 shows the deimmunized linker sequence and SEQ ID NO.:68 the original linker sequence.

### 1.3 Construction of Deimmunized Single Chain Antibody Sequences

[0196] The deimmunized versions of the anti-CD3 cassette were constructed by the method of overlapping PCR recombination. The anti-CD3 cassette (SEQ ID NO.:1, 2) in pPCR-S-Amp SK+ was used as the template for mutagenesis to the required deimmunized sequences. Sets of mutagenic primer pairs were synthezised encompassing the regions to be altered. The deimmunized sequences produced, including 4 different VH and 3 different VL regions, were cloned as Not1 to Hind 111 fragments into the vector pPCR-S-Amp SK+ and the entire DNA sequence was confirmed to be correct. The 4 different VH and 3 different VK regions were joined in all combinations (a total of 12), either by PCR or using a unique BstE11 site introduced at the 3′ end of the VH region. The entire DNA sequence of each combination was confirmed to be correct. The different deimmunized VH regions (SEQ ID NO.:70, 72, 74 and 76) and VL regions (SEQ ID NO.:78, 80 and 82) with the corresponding original non-deimmunized sequences (VH:SEQ ID NO.:110; VL:SEQ ID NO.:112) of the anti-CD3 constructs are summarized in Table 9.

TABLE 9
SEQ ID NOs.: of deimmunized VH and VL regions

| | | | SEQ ID NO.: | | SEQ ID NO.: | | SEQ ID NO.: | |
|---|---|---|---|---|---|---|---|---|
| | SEQ ID NO.: | | CDR1 | | CDR2 | | CDR3 | |
| | Nucleic | Amino | Nucleic | Amino | Nucleic | Amino | Nucleic | Amino |
| | acid | acid | acid | acid | acid | acid | acid | acid |
| Deimmunized VH2 | 69 | 70 | 85 | 86 | 93 | 94 | 95 | 96 |
| Deimmunized VH3 | 71 | 72 | 85 | 86 | 93 | 94 | 95 | 96 |
| Deimmunized VH5 | 73 | 74 | 87 | 88 | 91 | 92 | 95 | 96 |
| Deimmunized VH7 | 75 | 76 | 87 | 88 | 89 | 90 | 95 | 96 |
| VH of the non- | 109 | 110 | 83 | 84 | 89 | 90 | 95 | 96 |
| deimmunized CD3 | | | | | | | | |
| VH of the non- | 105 | 106 | 83 | 84 | 89 | 90 | 107 | 108 |
| deimmunized CD3 | | | | | | | | |
| with Cys→Ser | | | | | | | | |
| Mutation | | | | | | | | |
| Deimmunized VL1 | 77 | 78 | 99 | 100 | 101 | 102 | 103 | 104 |
| Deimmunized VL2 | 79 | 80 | 99 | 100 | 101 | 102 | 103 | 104 |
| Deimmunized VL3 | 81 | 82 | 97 | 98 | 101 | 102 | 103 | 104 |
| VL of the non- | 111 | 112 | 97 | 98 | 101 | 102 | 103 | 104 |
| deimmunized CD3 | | | | | | | | |

1.4 Transfer of Deimmunized Single Chain Antibody Genes into Expression Vector

[0197] The deimmunized anti-CD3 cassettes were excised from pPCR-S-Amp-SK+ with BspE1 and Sal1 and cloned into the expression vector pEF comprising VL_{CD19}-VH_{CD19}-VH_{CD3}-VL_{CD3}. The CD3 part of the pEF-DHFR vector was replaced with each of the deimmunized anti-CD3 cassettes from the BspE1 site to the Sal1 site resulting in the following 12 constructs:

pEF anti-CD19×anti-CD3 (VH2/VL1) (SEQ ID NOs.: 177, 178)
pEF anti-CD19×anti-CD3 (VH2/VL2) (SEQ ID NOs.: 179, 180)
pEF anti-CD19×anti-CD3 (VH2/VL3) (SEQ ID NOs.: 181, 182)
pEF anti-CD19×anti-CD3 (VH3/VL1) (SEQ ID NOs.: 183, 184)
pEF anti-CD19×anti-CD3 (VH3/VL2) (SEQ ID NOs.: 185, 186)
pEF anti-CD19×anti-CD3 (VH3/VL3) (SEQ ID NOs.: 187, 188)
pEF anti-CD19×anti-CD3 (VH5/VL1) (SEQ ID NOs.: 189, 190)
pEF anti-CD19×anti-CD3 (VH5/VL2) (SEQ ID NOs.: 191, 192)
pEF anti-CD19×anti-CD3 (VH5/VL3) (SEQ ID NOs.: 193, 194)
pEF anti-CD19×anti-CD3 (VH7/VL1) (SEQ ID NOs.: 195, 196)
pEF anti-CD19×anti-CD3 (VH7/VL1) (SEQ ID NOs.: 197, 198)
pEF anti-CD19×anti-CD3 (VH7/VL3) (SEQ ID NOs.: 199, 200).

[0198] The constructs further comprises a murine IgG heavy chain leader in order to enable the secretion of the protein. The DNA sequences of the deimmunized anti-CD3 cassettes in the expression vector were confirmed using the sequencing primers (SEQ ID NO.: 28 and 29). The DNA and amino acid sequences of the 12 deimmunized anti-CD3 cassettes in the pEF vector from the BspE1 site to the Sal1 site are shown in SEQ ID NOs.: 177-200.

### 1.5 Production of Antibody Constructs

[0199] After transformation of the vector into E. coli K12, transfection-grade DNAs of the different expression vectors were prepared. Secreted proteins were produced in CHO-dhfr- cells. For transient production the cell culture supernatants were harvested 2 days after transfection, for the generation of stable transfected cells, cells were put in selection medium two days after transfection. After five passages, stable pools were obtained. Subsequently, single clones were identified in limiting dilutions. To facilitate the purification process, the cells were adapted to serum-free medium. Antibody constructs were purified from about 1 liter of supernatant.

[0200] The production levels were tested in ELISA. No major differences in the secreted antibody levels were observed between different constructs comprising anti-CD19 and deimmunized anti-CD3 constructs.

### EXAMPLE 2

### Binding Assays

[0201] In order to analyze the binding efficacy of the deimmunized constructs to CD3 and CD19 a FACS-based assay was performed. Initially, crude supernatants were tested for binding on CD3-enriched PBMCs or CD19-positive NALM-6 cells. Cells were incubated with non-diluted supernatants for 30 minutes at 8° C. Upon two wash steps the cells were labeled with an anti-His antibody (Qiagen) under the same conditions. After additional wash steps binding of the constructs was detected with a FITC-conjugated sheep anti-mouse antibody (Sigma). Cells were analyzed with a FACS Calibur cytometer (B&D). As controls supernatants of anti-CD19×anti-CD3 and GFP-transfected cells were included. CD3 and a secondary antibody was used as a negative control and it showed a mean fluorescence intensity (MFI) of ca. 3.5. The anti-CD19×anti-CD3 constructs comprising anti-CD3 (VH5/VL1) (SEQ ID NO.:190), anti-CD3 (VH5/VL2) (SEQ ID NO.:192), anti-CD3 (VH5/VL3) (SEQ ID NO.:194), anti-CD3 (VH7/VL1) (SEQ ID NO.:196), anti-CD3 (VH7/VL2) (SEQ ID NO.:198) and anti-CD3 (VH7/VL3) (SEQ ID NO.:200) had a MFI of at least 90, thus binding about 25 times more strongly. The positive control, which was a non-deimmunized anti-CD19×anti-CD3 construct reached a MFI of around 60 showing that the deimmunized constructs comprising anti-CD3 (VH5/VL1) (SEQ ID NO.:190), anti-CD3 (VH5/VL2) (SEQ ID NO.:192), anti-CD3 (VH5/VL3) (SEQ ID NO.:194), anti-CD3 (VH7/VL1) (SEQ ID NO.:196), anti-CD3 (VH7/VL2) (SEQ ID NO.:198) and anti-CD3 (VH7/VL3) (SEQ ID NO.:200) bound CD3 with extremely high efficacy. In a second experiment, the following constructs comprising anti-CD19 and anti-CD3: anti-CD3 (VH2/VL1) (SEQ ID NO.:178), anti-CD3 (VH2/VL2) (SEQ ID NO.:180), anti-CD3 (VH2/VL3) (SEQ ID NO.:182, anti-CD3 (VH3/VL1) (SEQ ID NO.:184), anti-CD3 (VH3/VL2) (SEQ ID NO.:186) and anti-CD3 (VH3/VL3) (SEQ ID NO.:188), showed similar binding as the negative control (MFI ca. 6).

[0202] The FACS-based binding assay was also carried out for CD19. In this experiment CD19 and a secondary antibody was as a negative control. In this experiment, all assayed constructs achieved a MFI of at least 80 while the MFI of the negative control was ca. 3.

[0203] Thus, the constructs comprising anti-CD3 (VH5/VL1) (SEQ ID NO.:190), anti-CD3 (VH5/VL2) (SEQ ID NO.:192), anti-CD3 (VH5/VL3) (SEQ ID NO.:194), anti-CD3 (VH7/VL1) (SEQ ID NO.:196), anti-CD3 (VH7/VL2) (SEQ ID NO.:198) and anti-CD3 (VH7/VL3) (SEQ ID NO.:200) turned out to bind as well CD3 and CD19 as the non-modified anti-CD19×anti-CD3 (SEQ ID NO.:204). However, the constructs anti-CD3 (VH2/VL1) (SEQ ID NO.:178), anti-CD3 (VH2/VL2) (SEQ ID NO.:180), anti-CD3 (VH2/VL3) (SEQ ID NO.:182), anti-CD3 (VH3/VL1) (SEQ ID NO.:184), anti-CD3 (VH3/VL2) (SEQ ID NO.:186), anti-CD3 (VH3/VL3) (SEQ ID NO.:188) had completely lost anti-CD3 binding capacity, while CD19 binding was fully retained (FIG. 7).

[0204] Thus, it was demonstrated that the deimmunized heavy chains dominated the binding specificity and strength. As a result, the anti-CD3 constructs with VH5 and VH7 groups were purified and analyzed for cytotoxic activity.

### EXAMPLE 3

### Expression and Purification of the Variants Showing High Binding Affinity

[0205] The deimmunized anti-CD19×anti-CD3 proteins anti-CD3 (VH5/VL1) (SEQ ID NO.:190), anti-CD3 (VH5/VL2) (SEQ ID NO.:192), anti-CD3 (VH5/VL3) (SEQ ID NO.:194), anti-CD3 (VH7/VL1) (SEQ ID NO.:196), anti-CD3 (VH7/VL2) (SEQ ID NO.:198) and anti-CD3 (VH7/VL3) (SEQ ID NO.:200) were expressed in chinese hamster ovary cells (CHO).

[0206] In order to purify the bispecific single-chain constructs comprising a deimmunized anti-CD3 part CHO-CD19 cells were grown in roller bottles with HiClone CHO modified DMEM medium (HiQ)® for 7 days before harvest. The cells were removed by centrifugation and the supernatant, containing the expressed protein was stored at −20° C.

[0207] Äkta FPLC System® (Pharmacia) and Unicorn Software® were used for chromatography. All chemicals were of research grade and purchased from Sigma (Deisenhofen) or Merck (Darmstadt).

[0208] Hydrophobic charge induction chromatography was performed on MEP Hypercel® medium loaded to a XK16/60 column (Pharmacia) that was equilibrated with buffer A1 (20 mM Tris pH 7.2). 500 ml of cell culture supernatant were applied to the column (10 ml) with a flow rate of 3 ml/min. Unbound sample was washed out with buffer A1 and the bound protein was eluted with 100% buffer B1 (20 mM acetate pH 3.5). Eluted protein fractions were pooled for further purification.

[0209] IMAC was performed, using a HisTrap® column (Pharmacia) that was loaded with NiSO₄ according to the manufacturers protocol. The column was equilibrated with buffer A2 (20 mM NaP pH 7.5, 0.4 M NaCl) and the sample was diluted 2:1 with buffer A2 to obtain a pH of 7. The sample was applied to the column (2 ml) with a flow rate of 1 ml/min and the column was washed with buffer A2 to remove unbound sample. Bound protein was eluted using a 2 step gradient of buffer B2 (20 mM NaP pH 7.5, 0.4 M NaCl, 0.5 M Imidazol) Step 1: 20% buffer B2 in 10 column volumes; Step 2: 100% buffer B2 in 10 column volumes. Eluted protein fractions were pooled for further purification.

[0210] Gel filtration chromatography was performed on a Sephadex S200 HiPrep® column (Pharmacia) equilibrated with PBS (Gibco). Eluted protein samples (flow rate 1 ml/min) were subjected to SDS-Page and Western Blot for detection (FIG. 11).

[0211] The column was previously calibrated for molecular weight determination (molecular weight marker kit, Sigma MW GF-200).

[0212] The deimmunized variants of anti-CD19×anti-CD3 protein were isolated in a three step purification process' including hydrophobic charge induction chromatography (HCIC) (FIG. 8), immobilized metal affinity chromatography (IMAC) (FIG. 9) and gel filtration (FIG. 10). The bispecific construct had a molecular weight of 52 kDa under native conditions as determined by gelfiltration in PBS.

[0213] The purified bispecific protein was analyzed with SDS-PAGE under reducing conditions using precast 4-12% Bis Tris gels (Invitrogen). Sample preparation and application were according to the manufacturer's protocol. The molecular weight was determined with MultiMark® protein standard (Invitrogen). The gel was stained with colloidal Coomassie (Invitrogen protocol). The purity of the isolated protein was >95% (FIG. 11a) and the molecule has a size of 52 kD.

[0214] Furthermore, the deimmunized variants of anti-CD19×anti-CD3 protein were specifically detected by Western Blot. Western Blot was performed with an Optitran BA-S83® membrane and the Invitrogen Blot Module® according to the manufacturer's protocol. The antibodies used were Penta His (Quiagen) and Goat-anti-Mouse-Ig labeled with alkaline phophatase (AP) (Sigma), the staining solution was BCIP/NBT liquid (Sigma). The main signal was shown to correspond to the main band in the SDS-PAGE at 52 kD (FIG. 11b).

[0215] Protein concentrations were determined using protein assay dye (MicroBCA®, Pierce) and IgG (Biorad) as standard protein. A summary of the final yields of purified protein variants is given in Table 10 showing the high productivity of all the constructs and very good yield of construct with anti-CD3 (VH5/VL1) (SEQ ID NO.:190) of 924.8 μg.

TABLE 10
Protein yields of the deimmunized anti-CD19-anti-CD3 constructs

| | Yield [μg/ |
|---|---|
| Deimmunized CD3 construct | supernatant] |
| CD19 × anti CD3 (VH5/VL1)(SEQ ID NO.: 190) | 924.8 |
| CD19 × anti CD3 (VH5/VL2)(SEQ ID NO.: 192) | 446.7 |
| CD19 × anti CD3 (VH5/VL3)(SEQ ID NO.: 194) | 218.4 |
| CD19 × anti CD3 (VH7/VL1)(SEQ ID NO.: 196) | 268.5 |
| CD19 × anti CD3 (VH7/VL2)(SEQ ID NO.: 198) | 553.4 |
| CD19 × anti CD3 (VH7/VL3) (SEQ ID NO.: 200) | 477.3 |

[0216] The productivity of the CD19×anti-CD3 (VH5/VL2) and CD19×anti-CD3(VH7/VL2) constructs was compared with the corresponding non-deimmunized constructs. The results are shown in Table 11.

TABLE 11
Yields of the deimmunized bispecific construct compared to the
corresponding non-deimmunized construct

| Construct | Yield (μg/l) |
|---|---|
| CD19 × anti-CD3 | 62 |
| CD19 × antiCD3 (VH5/VL2) | 204 |
| CD19 × antiCD3 (VH7/VL2) | 310 |

[0217] Table 11 clearly demonstrates that the bispecific constructs comprising deimmunized CD3 binding domain have much higher (at least three fold) productivity than the corresponding non-deimmunized construct.

### EXAMPLE 4

### FACS Based Binding Assays of the Anti-CD3 Constructs

[0218] Binding of selected purified antibody constructs comprising anti-CD19 and anti-CD3 was detected as described above in Example 2 at various concentrations. In the CD3 binding assay, the negative control secondary antibody (anti-His, FITC-conjugated), which was incubated with CD3 positive cells, showed a MFI of about 2.5 and the positive control deimmunized antiCD19×anti-CD3 bispecific single chain antibody of about 70 at 1 μg/ml concentration and 50 at 5 μg/ml concentration (FIG. 12A). At the concentration of 1 μg/ml, the anti-CD3 (VH5/VL1) (SEQ ID NO.:190), anti-CD3 (VH7/VL1) (SEQ ID NO.:196), anti-CD3 (VH7/VL2) (SEQ ID NO.:198) and anti-CD3 (VH7/VL3) (SEQ ID NO.:200) deimmunized bispecific antibodies showed MFI values of 10-20; anti-CD3 (VH5/VL1) (SEQ ID NO.:190) having the highest (20). At 0.5 μg/ml anti-CD3 (VH7/VL2) (SEQ ID NO.:198) reached a MFI of 25, while anti-CD3 (VH7/VL1) (SEQ ID NO.:196), anti-CD3 (VH7/VL3) (SEQ ID NO.:200) and anti-CD3 (VH5/VL1) (SEQ ID NO.:190) had an MFI of at least 40 thus, showing the same binding efficacy than the non-deimmunized positive control. At a concentration of 5 μg/ml the strongly binding constructs with deimmunized anti-CD3 part VH5/VL1 (SEQ ID NO.:190), VH7/VL1 (SEQ ID NO.:196), VH7/VL2 (SEQ ID NO.:198), VH7/VL3 (SEQ ID NO.:200) bound to CD3 as well as the non-deimmunized anti-CD19×anti-CD3 (SEQ ID NO.:204).

[0219] All the antibody constructs bound to CD19 with a high efficacy, which was at about 200 MFI, while non-deimmunized anti-CD19×anti-CD3 construct (SEQ ID NO.:204) showed 80 MFI. No differences were observed for CD19 binding at the tested concentrations for the different constructs (FIG. 12B).

### EXAMPLE 5

### Cytotoxicity Assays

[0220] Anti-CD19×anti-CD3 mediates T cell dependent cytotoxicity to CD19-positive target cells. This was analyzed in vitro for the determination of the biological potency of anti-CD19×anti-CD3.

[0221] For this purposes fluorescence labeled CD19-positive NALM-6 target cells were incubated with isolated PBMC of random donors or CB15 T-cells (standardized T-cell line) as effector cells in the presence of anti-CD19×anti-CD3. After incubation for 4 h at 37° C. in a humidified incubator, the release of the fluorescent dye from the target cells into the supernatant is determined in a spectrofluorimeter. Target cells incubated without anti-CD19×anti-CD3 and target cells totally lysed by the addition of saponin at the end of the incubation serve as negative and positive controls, respectively. The specific cytotoxicity mediated at a certain anti-CD19×anti-CD3 concentration can be calculated with the following formula:

$$Specific Cytotoxicity [ \% ] = \frac{RFU ( Sample ) - Mean RFU ( control )}{Mean RFU ( total lysis ) - Mean RFU ( control )} \times 100$$

[0222] The dose response was analyzed from 0.4 pg/ml anti-CD19×anti-CD3 to 100 ng/ml anti-CD19×anti-CD3 to specify the EC50 value. Although the EC50 value describes the biological potency of anti-CD19×anti-CD3, the absolute value will vary significantly depending on the source of the effector cells. Thus a relative potency is calculated in comparison to an anti-CD19×anti-CD3 reference material based on the following formula:

$$Relative Potency = \frac{EC 50 Sample}{EC 50 Reference}$$

[0223] The cytotoxic activities of the constructs comprising anti-CD19 and deimmunized anti-CD3 are shown in FIG. 13. Purified non-deimmunized anti-CD19×anti-CD3 was used as control. The EC50 values of the deimmunized constructs were at a range of 21.9-81.6 pg/ml while the EC50 value of the non-deimmunized anti-CD19×anti-CD3 construct was 22.7 pg/ml. Thus, all deimmunized constructs revealed EC 50 values comparable to the non-deimmunized molecule.

### EXAMPLE 6

### T-Cell Proliferation Assay

[0224] Twenty healthy donors were selected for screening in T cell assays based on HLA-DR typing (Table 12). This enables the screening of peptides in the T cell assay against greater than 80% of DR alleles expressed in the world population.

TABLE 12
HLA DR haplotypes of 20 healthy donors used to test the
immunogenicity of peptides obtained from deimmunized
and non-deimmunized anti-CD3 scAb.

| | HLA DR Allotype |
|---|---|
| 1 | DRB1*07, DRB1*15, DRB4*01, DRB5 |
| 2 | DRB1*03, DRB1*04, DRB3, DRB4*01 |
| 3 | DRB1*04, DRB1*07 and DRB4*01 |
| 4 | DRB1*07, DRB1*11, DRB4*01 |
| 5 | DRB1*04, DRB1*07, DRB4*01 |
| 6 | DRB1*01, DRB1*04, DRB4*01 |
| 7 | DRB1*03, DRB1*07, DRB3, DRB4*01 |
| 8 | DRB1*07, DRB1*11, DRB3, DRB4*01 |
| 9 | DRB1*12. DRB1*15, DRB3, DRB5 |
| 10 | DRB1*01, DRB1*09, DRB4*01 |
| 11 | DRB1*03, DRB1*15, DRB3, DRB5 |
| 12 | DRB1*10, DRB1*13, DRB3 |
| 13 | DRB1*03, DRB1*15, DRB3, DRB5 |
| 14 | DRB1*04, DRb1*15, DRB4*01, DRB5 |
| 15 | DRB1*04, DRB1*13, DRB3, DRB4*01 |
| 16 | DRB1*01, DRB1*13, DRB3 |
| 17 | DRB1*01, DRB1*04, DRB4*01 |
| 18 | DRB1*07, DRB1*13, DRB3, DRB4*01 |
| 19 | DRB1*07, DRB1*16, DRB4*01, DRB5 |
| 20 | DRB1*04, DRB1*15, DRB4*01, DRB5 |

### 6.1 T-Cell Proliferation Assay

[0225] Peptides were obtained from Pepscan (Netherlands) at a purity of greater than 90%. Peripheral blood mononuclear cells (PBMC) from the 20 selected healthy donors (Table 12) were used to screen individual peptides in triplicate wells at 1 and 5 μM. Two positive control peptides (C32 and C49) and keyhole limpet hemocyanin (KLH) were included in the assay. After 7 days incubation of cells and peptides, an 18 hour pulse with 3H-thymidine at 1 μCi/well was used to assess T cell proliferation. These data are expressed as stimulation index where:

Stimulation Index=CPM of test peptide/CPM of untreated control

[0226] A T cell epitope is defined as a peptide giving a stimulation index (SI) greater than 2. The results from two independent runs indicated that 5 of the 22 MHC binding peptides in the non-deimmunized anti-CD3 sequence had the capacity to induce human T cell proliferation (SI>2). In contrast, none of the corresponding deimmunized molecules induced T cell proliferation. Table 13 summarizes the T cell proliferation assay results showing Mean SI values of 2 independent runs. The data also showed a concentration dependent effect whereby each of the non-deimmunized binding molecules showed SI's>2 in only one of the two concentrations (1 μm or 5 μm) used. The difference in response at different concentrations is explained by the fact that individual peptides will have optimum concentrations at which they induced T cell proliferation. If this concentration is exceeded, then proliferation can drop off (high peptide concentrations can have an inhibitory effect on T cell proliferation). This explains why, in some instances, proliferation is seen at the lower concentration and not at the higher. From experience, T cell proliferation will be observed at one or two of the peptide concentrations used if a peptide contains a T cell epitope. These data demonstrated that deimmunization had successfully removed T cell epitopes from anti-CD3 (VH5/VL2) (SEQ ID NO.:19) and anti-CD3 (VH7/VL2) (SEQ ID NO.:25). The fact that about 75% of MHC binding peptides from the non-deimmunized anti-CD3 sequence did not induce T cell proliferation can be explained either by tolerance of the human immune system to these peptides or an inability of the human T cell repertoire to recognise these particular peptides.

TABLE 13
Summary of data comparing positive (SI > 2) mouse
peptides and corresponding deimmunized peptides.

| | | Concen- | Non-deimmunized | Deimmunized |
|---|---|---|---|---|
| Peptide | | tration | Anti-CD3 | Anti-CD3 |
| Region | Allotype | (μM) | Mean SI | Mean SI |
| 6-20 | 5 | 5 | 2.51 | 0.77 |
| 74-86 | 5 | 1 | 2.52 | 0.97 |
| | | | | 0.96 |
| 90-102 | 5 | 5 | 2.21 | 0.56 |
| | | | | 1.38 |
| 90-102 | 6 | 5 | 2.24 | 0.90 |
| | | | | 0.82 |
| 90-102 | 11 | 5 | 2.23 | 0.83 |
| | | | | 0.78 |
| 162-174 | 5 | 1 | 3.82 | 0.59 |
| 216-230 | 10 | 1 | 2.12 | 1.03 |

### EXAMPLE 7

### Homology Alignment of Anti-CD3 (VH5), Anti-CD3 (VH7), Anti-CD3 (VH2) and Anti-CD3 (VH3) with the Non-Deimmunized Anti-CD3 VH

[0227] The variable heavy region of the non-deimmunized CD3 antibody, VH5 (SEQ ID NO.:74), VH7 (SEQ ID NO.:76), VH2 (SEQ ID NO.:70) and VH3 (SEQ ID NO.:72) were aligned using the AlingnX program of Vector NTI Advance (Informax, Inc., USA). The Clustal W algorithm used is described in Nucleic Acid Research, 22 (22): 4673-4860, 1994. The alignment is shown in FIG. 14. From the alignment can be seen that the variable regions VH5 and VH7, which show surprisingly good binding have the sequence ASGYTF at the transition region of framework 1 to CDR1. Furthermore, the VH regions showing no binding (VH2 (SEQ ID NO.:70) and VH3 (SEQ ID NO.:72)) comprise the sequence ASGYTA at the transition of framework 1 to CDR1. Thus, for obtaining a construct having reduced propensity to generate T cell epitopes and binding to CD3, the construct has to comprise the sequence ASGYTF at the transition of framework 1 to CDR1. Surprisingly, the variable heavy regions binding to CD3 and showing reduced propensity to generate T cell epitopes comprising the above-mentioned sequence ASGYTF show good binding.

### EXAMPLE 8

### Cloning of Constructs Comprising Deimmunized Anti-CD3 and Anti-EpCAM

[0228] In order to demonstrate that the deimmunized anti-CD3 polypeptide of the invention can be a part of a functional construct with other targets, a number of bispecific constructs comprising deimmunized anti-CD3 (VH5/VL2) (SEQ ID NO.:19) and different anti-EpCAM single chain antibodies (3-1 (SEQ ID NO.:137, 139), 3-5 (SEQ ID NO.:141, 143), 4-1 (SEQ ID NO.:145, 147), 4-7 (SEQ ID NO.:149, 151), 5-10 (SEQ ID NO.:133, 135)) were generated.

### 8.1 Cloning of C-Terminal EpCAM Binders Comprising Deimmunized Anti-CD3 Part (SEQ ID NOs.: 30, 31, 32, 33, 34, 35, 36, 37, 38 and 39)

[0229] 8.1.1 Amplification of the Deimmunized Anti-CD3 from the Anti-CD19×Anti-CD3 (VH5/VL2) Construct (SEQ ID NO.:192)

[0230] The N-terminal deimmunized anti-CD3(VH5/VL2) was obtained by PCR using the deimmunized (CD19×anti-CD3 (VH5/VL2) (SEQ ID NO:192) as template and the following primers (DI CD3 5-2 VH BsrGI AGGTGTACACTCCGACGTCCAACTGGTGCAGTCAG (SEQ ID NO.:40), DI CD3 5-2 VL BspEI AATCCGGATTTGATCTCCACCTTGGTCCCG (SEQ ID NO.:41).

### 8.1.2. Cloning and Expression of the Deimmunized Anti-CD3×Anti-EpCAM Deimmunized Constructs in VH_{CD3}-VL_{CD3}×VH_{EpCAM}-VL_{EpCAM} Orientation

[0231] The above mentioned PCR product containing the deimmunized anti-CD3 was cleaved with the restriction enzymes BsrG1 and BspE1 and subsequently cloned into the bluescript KS vector (Stratagene, La Jolla, Calif.), containing the amino acid sequence of an eukaryotic secretory signal (leader peptide) as a EcoRI/BsrGI-fragment. After cleavage of this construct with EcoRI and BspEI the resulting DNA fragment comprising the respective anti-CD3 scFv with the leader peptide was cloned into a EcoRI/BspEI cleaved plasmid containing the anti EpCAM scFv 3-1, 4-7, or 5-10 in C-terminal position in pEF-DHFR— vector. After confirmation of the sequence coding for the bispecific single chain by sequencing (Sequiserve, Vaterstetten) the plasmid was transfected into DHFR deficient CHO cells for eukaryotic expression. Eukaryotic protein expression in DHFR deficient CHO cells was performed as described in Kaufmann R. J. (1990) Methods Enzymol. 185, 537-566).

### 8.1.3. Cloning and Expression of the Deimmunized Anti-CD3×Anti-EpCAM Constructs in VH_{CD3}-VL_{CD3}×VL_{EpCAM}-VH_{EpCAM} Orientation

[0232] Anti-EpCAM 4-7 in VL-VH orientation containing the 15 amino acid standard linker (SEQ ID NO.:168) was obtained by PCR. The 4-7 VH region and the 4-7 VL region were separately amplified by the following primers (4-7 VL: 4-7 VL BspEI FOR CTGAAATCCGGAGGTGGTGGATCCGAGCTCGTGATGACCCAGACTCC (SEQ ID NO.:117), 4-7 VL GS15 REV GGAGCCGCCGCCGCCAGAACCACCA CCACCTTTGATCTCAAGCTTGGTCCCC (SEQ ID NO.:118); 4-7 VH: 4-7 VH GS15 FOR GGCGGCGGCGGCTCCGGTGGTGGTGGTTCTGAGGTGCAGCTGCTCGAGCAG (SEQ ID NO.:42), 4-7 VH SaII REV TTTTAAGTCGACCTAATGATGATGAT-GATGATGTGAGGAGACGGTGACCGTGG (SEQ ID NO.:43)). Overlapping complementary sequences introduced into the PCR products were used to form the coding sequence of a 15-amino acid (G₄S₁)3 (single-letter amino acid code) linker (standard linker) (SEQ ID NO.:168) during the subsequent fusion PCR. This amplification step was performed with the primer pair 4-7 VL BspEI FOR and 4-7 VH SaII REV (SEQ ID Ns. 42 and 43).

[0233] Anti-EpCAM 5-10 in VL-VH orientation containing the 15 amino acid standard ((G₄S₁)3) linker was obtained by PCR. The 5-10 VH region and the 5-10 VL region were separately amplified by the following primers (5-10 VL: 5-10 VL BspEI FOR CTGAAATCCGGAGGTGGTGGATCCGAGCTCGTGATGACACAGTCTCCAT (SEQ ID NO.:44), 5-10 VL GS15 REV GGAGCCGCCGCCGCCAGAACCACCACCACCTTTGATCTCAAGCTTGGTCCCAG; (SEQ ID NO.:45) 5-10 VH: 5-10 VH GS15 FOR GGCGGCGGCGGCTCCGGTGGTGGTGGTTCTGAGGTGCAGCTGCTCGAGC. (SEQ ID NO.:46), 5-10 VH SaII REV TTTTAAGTCGACCTAATGATGATGATGATGATGTGAGGAGACGGTGACCGTGG (SEQ ID NO.:47). Overlapping complementary sequences introduced into the PCR products were used to form the coding sequence of a 15-amino acid (G₄S₁)₃ (single-letter amino acid code) linker (standard linker) (SEQ ID NO.:168) during the subsequent fusion PCR. This amplification step was performed with the primer pair 5-10 VL BspEI FOR and 5-10 VH Sail REV.

[0234] The PCR products 5-10 VL-VH and 4-7 VL-VH) were cloned into the pEF-DHFR vector comprising anti-CD3 construct (VH5/VL2). After confirmation of the sequence coding for the bispecific single chain by sequencing the plasmid was transfected into DHFR deficient CHO cells for eukaryotic expression. Eukaryotic protein expression in DHFR deficient CHO cells was performed as described in Kaufmann R. J. (1990) Methods Enzymol. 185, 537-566).

8.1.4. Binding of the Deimmunized Anti-CD3×anti-EpCAM Constructs to EpCAM and CD3

[0235] Binding of the bispecific single chain molecules with anti-CD3 part in N-terminal orientation to EpCAM and CD3 were confirmed by FACS analyses. For that purpose the EpCAM positive human gastric cancer cell line Kato III (ATCC HTB-103) was used. Binding of the anti-CD3 part was demonstrated on Jurkat cells (ATCC TIB 152).

[0236] Cells were cultured according to the recommendations of the supplier and a number of 200000 cells was incubated with 10 μg/ml of the construct in 50 μl PBS with 2% FCS (fetal calf serum). The binding of the construct was detected with an anti-His antibody (Penta-His Antibody, obtained from Qiagen, Hilden, FRG) at 2 μg/ml in PBS with 2% FCS. As a second step R-Phycoerythrin-conjugated affinity purified F(ab′)₂ derived from goat anti-mouse IgG, diluted 1:100 in 50 μl PBS with 2% FCS (Dianova, Hamburg, FRG) was used. The samples were measured on a FACSscan (BD biosciences, Heidelberg, FRG).

[0237] Results of FACS analysis are shown in FIG. 15. All constructs comprising deimmunized anti-CD3 part showed stronger binding than the non-deimmunized anti-EpCAM (M79)×anti-CD3 bispecific single-chain antibody on EpCAM positive KatoIII cells.

### 8.2 Cloning of N-Terminal EpCAM Binders Comprising Deimmunized Anti-CD3 Part

### 8.2.1 Cloning of the Anti-EpCAM×Anti-CD3 Constructs

### 8.2.1.1 Cloning of Deimmunized 3-1×Anti-CD3 (VH5/VL2) Construct (SEQ ID NO.:48, 49):

[0238] Deimmunized construct 3-1×anti-CD3 (VH5/VL2) (SEQ ID NO.:48) was derived from non-deimmunized construct anti-EpCAM (3-1)×anti-CD3. The VH and VL regions of the anti-EpCAM antibody 3-1 are shown in SEQ ID NO.:137 and 139. The plasmids pEF-DHFR-3-1×anti-CD3 and pEF anti-CD3 (VH5/VL2) (SEQ ID NO.:192) were digested with BspEI and SaII (Biolabs) for the isolation of the vector and the insert anti-CD3 (VH5/VL2), respectively. The BspEI-SaII-digested vector was dephosphorylated and purified on 0.7% agarose gel, whereas the insert was purified on 1.5% agarose gel.

[0239] The purified fragment (BspEI-SaII) was subsequently cloned into the corresponding sites of the pEF-DHFR vector. The final 3-1×anti-CD3 (VH5/VL2) construct (SEQ ID NO.:48, 49) was verified by restriction digests and by DNA sequencing of the entire insert.

### Cloning of the Non-Deimmunized 3-1×Anti-CD3 Construct:

[0240] For the cloning of the 3-1×anti-CD3 (VH5/VL2) construct the corresponding non-deimmunized construct was generated as follows.

[0241] The C-terminal 3-1 in VH-VL orientation was obtained by PCR for the construction of non-deimmunized 3-1×anti-CD3 molecule. Fragments I and II comprising the 3-1 VH-VL in two parts were amplified by PCR using primer pairs me 91a (SEQ ID NO.: 53)/me 90 (SEQ ID NO.: 52) and me 83 (SEQ ID NO.: 50)/me 84 (SEQ ID NO.: 51), respectively. Hot Start PCR was done using the Expand High Fidelity System of Roche Diagnostics. 20 cycles (94° C./30 sec; 60° C./1 min; 72° C./1 min) were used for amplification followed by one cycle of 3 min at 72° C.

[0242] PCR fragments I and II were subjected to electrophoresis on a 1.5% agarose gel. Fragments were mixed (1 ng of each) and used as a template for the next PCR reaction performed with primer pair me 91a (SEQ ID NO.: 53) and me 84 (SEQ ID NO.: 51) for amplification of fragment III comprising the entire 3-1. PCR was performed as described above, but with an annealing temperature of 68° C. Fragment III was purified on an agarose gel and digested with BsrGI and BspEI (Biolabs), purified and subsequently cloned into the corresponding sites of the pEF-DHFR-anti EpCAM (M79)×anti-CD3 construct. The cloned region was verified by restriction digests and by DNA-sequencing.

### Sequences of the Primers Used:

Me 83:

(SEQ ID NO.: 50)

5′- GGT TCT GGC GGC GGC GGC TCC GGT GGT GGT GGT
TCT GAG GTG CAG CTG CTC GA CAG TCT G -3′
Me 84:

(SEQ ID NO.: 51)

5′- GTG CTC CGG AGG AGA CGG TGA CCG TGG TCC CTT
GGC CCC AG -3′
Me 90:

(SEQ ID NO.: 52)

5′- CCG GAG CCG CCG CCG CCA GAA CCA CCA CCA CCT
TTG ATC TCA AGC TTG GTC CC-3′
Me 91a:

(SEQ ID NO.: 53)

5′- GGA TTG TAC A CTCC GA GCT CGT CAT GAC CCA GTC
TCC ATC TTA TCT TGC TGC -3′

### 8.2.1.2 Cloning of Deimmunized 3-5×Anti-CD3 (VH5/VL2) Construct (SEQ ID NO.:54, 55):

[0244] The C-terminal 3-5 in VH-VL orientation was obtained by PCR for the construction of 3-5×anti-CD3 molecule. The VH and VL regions of the anti-EpCAM antibody 3-5 are shown in SEQ ID NO.:141 and 143. The plasmids pEF-DHFR-3-5×anti-CD3 and pEF anti-CD3 (VH5/VL2) (SEQ ID NO.: 192) were digested with EcoRI and BspEI (Biolabs) for the isolation of the insert (3-5) and the vector respectively. The dephosphorylated vector (EcoRI and BspEI digested) and the insert were purified by agarose gel-electrophoresis.

[0245] The purified fragment (EcoRI-BspEI) was subsequently cloned into the corresponding sites of the pEF-DHFR vector. The final 3-5×anti-CD3 (VH5/VL2) (SEQ ID NO.:54) construct was verified by restriction digests.

### Cloning of the Non-Deimmunized 3-5×Anti-CD3 Construct:

[0246] For cloning of the 3-5×anti-CD3 (VH5/VL2) construct the corresponding non-deimmunized construct was generated as follows.

[0247] Fragments I and II comprising the 3-5 in two parts were amplified by PCR according to the conditions described for 3-1×anti-CD3 using primer pairs me 81 (SEQ ID NO.: 56)/me 90 (SEQ ID NO.: 52) and me 83 (SEQ ID NO.: 50)/me 84 (SEQ ID NO.: 51) respectively. Agarose gel fragments comprising PCR fragments I and III were reamplified with primer pair me 81 (SEQ ID NO.: 56) and me 84 (SEQ ID NO.: 51) for amplification of fragment III comprising the entire 3-5. PCR was performed as described above. Fragment III was purified on an agarose gel and digested with BssHII and BspEI (Biolabs), purified and subsequently cloned into the corresponding sites of the pEF-DHFRcloning vector. The cloned region was verified by restriction digests and by DNA-sequencing.

### Sequence of the Me81 Primer (Seq ID NO.:56):

Me 81:
5′- GGA TGC GCG CGA GCT CGT GAT GAC CCA GAC TCCA
CTC TCC-3′

### 8.2.1.3 Cloning of the Deimmunized 4-1×Anti-CD3 (VH5/VL2) Construct (SEQ ID NO.:57, 58):

[0249] The C-terminal 4-1 in VH-VL orientation was obtained by PCR for the construction of 4-1×anti-CD3 molecule. The VH and VL regions of the anti-EpCAM antibody 4-1 are shown in SEQ ID NO.:145 and 147. The plasmids pEF-DHFR4-1×anti-CD3 and pEF anti-CD3 (VH5/VL2) (SEQ ID NO.:192) were digested with EcoRI and BspEI (Biolabs) for the isolation of the insert (4-1) and the vector respectively. The dephosphorylated vector (EcoRI and BspEI digested) and the insert were purified by agarose gel-electrophoresis.

[0250] The purified fragment (EcoRI-BspEI) was subsequently cloned into the corresponding sites of the vector. The final construct 4-1×anti-CD3 (VH5/VL2) (SEQ ID NO.:57) was verified by restriction digests.

### Cloning of the Non-Deimmunized 4-1×Anti-CD3 Construct:

[0251] For cloning of the 4-1×anti-CD3 (VH5/VL2) construct the corresponding non-deimmunized construct was generated as follows.

[0252] Fragments I and II comprising the 4-1 in two parts were amplified by PCR using primer pairs me 91a (SEQ ID NO.: 53)/me 90 (SEQ ID NO.: 452) and me 83 (SEQ ID NO.: 50)/me 84 (SEQ ID NO.: 51) with the above-mentioned conditions, respectively.

[0253] Agarose gel fragments comprising PCR fragments I and III were reamplified with primer pair me 92a (SEQ ID NO.: 59) and me 84 (SEQ ID NO.: 51) for amplification of fragment III comprising the entire 4-1. PCR was performed as described above but annealing was performed at 68° C. Fragment III was purified on an agarose gel and digested with BsrGI and BspEI (Biolabs), purified and subsequently cloned into the corresponding sites of the pEF-DHFR-anti EpCAM (M79)×anti-CD3 cloning vector construct. The cloned region was verified by restriction digests and by DNA-sequencing.

### Sequence of the Me92a Primer (SEQ ID NO.: 59):

Me 92a:
5′- GGA TTG TAC A CTCC GA GCT CGT GAT GAC ACA
GTCTCC ATC CTC C-3′

### 8.1.2.4 Cloning of the Deimmunized 4-7×Anti-CD3 (VH5/VL2) Construct (SEQ ID NO.:60, 61):

[0255] The C-terminal 4-7 in VH-VL orientation was obtained by PCR for the construction of 4-7×anti-CD3. The VH and VL regions of the anti-EpCAM antibody 4-7 are shown in SEQ ID NO.:149 and 151. The plasmids pEF-DHFR-4-7×anti-CD3 and pEF anti-CD3 VH5/VL2 (SEQ ID NO.:192) were digested with EcoRI and BspEI (Biolabs) for the isolation of the insert (4-7) and the vector respectively. The de-phosphorylated vector (EcoRI and BspEI digested) and the insert were purified by agarose gel-electrophoresis.

[0256] The purified fragment (EcoRI-BspEI) was subsequently cloned into the corresponding sites of the pEF-DHFR vector. The final construct 4-7×anti-CD3 (VH5/VL2) (SEQ ID NO.:60) was verified by restriction digests.

### Cloning of the Non-Deimmunized Construct 4-7×Anti-CD3:

[0257] For cloning of the 4-7×anti-CD3 (VH5/VL2) construct the corresponding non-deimmunized construct was generated as follows.

[0258] Fragments I and II comprising the 4-7 in two parts were amplified by PCR using primer pairs me 81 (SEQ ID NO.:56)/me 90 (SEQ ID NO.:52) and me 83 (SEQ ID NO.:50)/me 84 (SEQ ID NO.:51) with the afore mentioned conditions, respectively. Agarose gel fragments comprising PCR fragments I and III were reamplified with primer pair me 81 (Seq ID NO.:56) and me 84 (Seq ID NO.:51) for amplification of fragment III comprising the entire 4-7 VH and VL chain. PCR was performed as described above. Fragment III was purified on an agarose gel and digested with BssHII and BspEI (Biolabs), purified and subsequently cloned into the corresponding sites of the pEF-DHFR cloning vector. The cloned region was verified by restriction digests and by DNA-sequencing.

8.1.2.5 Cloning of the Deimmunized 5-10×anti-CD3 (VH5/VL2) Construct (SEQ ID NO.: 62, 63):

[0259] The C-terminal 5-10 in VH-VL orientation was obtained by PCR for the construction of 5-10×anti-CD3 molecule. The VH and VL regions of the anti-EpCAM antibody 5-10 are shown in SEQ ID NO.:133 and 135. The plasmids pEF-DHFR-5-10×anti-CD3 and pEF anti-CD3 (VH5/VL2) (SEQ ID NO.:192) were digested with EcoRI and BspEI (Biolabs) for the isolation of the insert (5-10) and the vector respectively. The dephosphorylated vector (EcoRI and BspEI digested) and the insert were purified by agarose gel-electrophoresis.

[0260] The purified fragment (EcoRI-BspEI) was subsequently cloned into the corresponding sites of the pEF-DHFR vector. The final construct 5-10×anti-CD3 (VH5/VL2) (SEQ ID NO.: 62) was verified by restriction digests and by DNA sequencing.

### Cloning of the Non-Deimmunized 5-10×Anti-CD3 Construct:

[0261] For cloning the 5-10×anti-CD3 (VH5/VL2) construct the corresponding non-deimmunized construct was generated as follows.

[0262] Fragments I and II comprising the 5-10 in two parts were amplified by PCR using primer pairs me 92a (SEQ ID NO.: 59)/me 90 (SEQ ID NO.: 52) and me 83 (SEQ ID NO.: 50)/me 84 (SEQ ID NO.: 51) with the above mentioned conditions, respectively. Agarose gel fragments comprising PCR fragments I and II were reamplified with primer pair me 92a SEQ ID NO.: 59) and me 84 (SEQ ID NO.: 51) for amplification of fragment III comprising the entire 5-10. PCR was performed as described above but annealing was performed at 68° C. Fragment III was purified on an agarose gel and digested with BsrGI and BspEI (Biolabs), purified and subsequently cloned into the corresponding sites of the pEF-DHFR-anti EpCAM (M79)×anti-CD3 cloning vector. The cloned region was verified by restriction digests and by DNA-sequencing.

8.2.2 Expression of Anti EpCAM×Deimmunized-Anti-CD3 Molecules with Anti-EpCAM at the N-Terminal Position:

[0263] CHO-cells lacking DHFR gene were maintained in alpha MEM medium (Life Technologies, cat. no: 32561) supplemented with 10% fetal calf serum (Life Technologies, heat inactivated at 65° C. for 30 minutes) and with HT (Hypoxanthin and Thymidine; Life Technologies). The cells were transfected with pEF-DHFR-3-1×anti-CD3 (VH5/VL2) (SEQ ID NO.: 48) and pEF-DHFR-5-10×anti-CD3 (VH5/VL2) (SEQ ID NO.:62), using Lipofectamine 2000 kit® (Invitrogen) according to the instructions provided by the Manufacturer. After 48 hrs. selection was performed in selection medium (alpha MEM medium containing heat inactivated 10% dialysed fetal calf serum (Life Technologies). After 3-4 weeks cell culture supernatant was collected and centrifuged at 4° C. for 10 minutes at 300 g to remove cells and cell debris. The supernatant containing the bispecific antibody was stored at −20° C. till further analysis.

### 8.2.3 Binding Assays of Bispecific Anti-EpCAM×Anti-CD3 Variants:

[0264] 250000 Jurkat cells (for CD3 binding) and Kato cells (for EpCAM binding) were independently incubated with cell culture supernatants (50 μl) containing the bispecific construct (pEF-DHFR-3-1×anti-CD3 (VH5/VL2) (Nr.50, SEQ ID NO.: 48) and pEF-DHFR-5-10×anti-CD3 (VH5/VL2) (Nr.54) (SEQ ID NO.:62), respectively) for 45 min. at 4° C. Thereafter, the cells were washed twice in FACS buffer (phosphate-buffered saline containing 1% fetal calf serum (FCS) and 0.05% sodium azide) and incubated with mouse anti-His antibody (Dianova, DIA910) for 60 min. at 4° C. Washing steps were performed as above.

[0265] The cells were finally incubated either with goat anti-mouse Ig-FITC-conjugated antibody (BD 550003) or with anti-mouse IgG conjugated with PE (Sigma, P8547). After washing steps, 10000 events were analysed using FACS Calibur (B&D). The results of the binding assays are shown in FIG. 16. The constructs 3-1×anti-CD3 (VH5/VL2) (SEQ ID NO.:49) and 5-10×anti-CD3 (SEQ ID NO.:63) showed strong binding to CD3 on Jurkat cells and to CD19 on Kato cells.

### EXAMPLE 8.3

### Purification of Bispecific Anti EpCAM Constructs with Deimmunized Anti-CD3 Part

[0266] The constructs comprising a deimmunized anti-CD3 region and an EpCAM-specific region were purified with a two-step purification process including immobilized metal affinity chromatography (IMAC) and gel filtration. Metal affinity chromatography (IMAC) and gel filtration were carried out as demonstrated in example 3.2.

[0267] A further high-resolution cation exchange chromatography was performed on a MiniS column (Amersham), equilibrated with 20 mM MES buffer pH 5.5. The sample was diluted 1:3 with the same buffer before loading to the column. Bound protein was eluted with a 0-30% gradient gradient of 1 M NaCl in equilibration buffer. The eluted protein fractions were tested in the bioactivity assay. Table 14 shows the yields of the purified deimmunized EpCAM constructs. All the constructs could be efficiently produced. Surprisingly, the construct 5-10×anti-CD3 (VH5/VL2) (SEQ ID NO.:63) had an extremely good yield of 2200 μg/l.

TABLE 14
Yields of the deimmunized EpCAM constructs

| | Yield of the monomer |
|---|---|
| | [μg purified protein |
| Construct | per liter culture] |
| anti-CD3 (VH5/VL2) × 4-7 (SEQ ID NO.: 33) | 112.5 |
| 3-1 × anti-CD3 (VH5/VL2) (SEQ ID NO.: 49) | 87.5 |
| anti-CD3 (VH5/VL2) × 3-1 (SEQ ID NO.: 31) | 442.5 |
| 5-10 × anti-CD3 (VH5/VL2) (SEQ ID NO.: 63) | 2200 |
| anti-CD 3 (VH5/VL2) × 5-10 (SEQ ID NO.: 37) | 80 |

### EXAMPLE 8.4

### Cytotoxic Assays of the Bispecific Anti-EpCAM Constructs with Deimmunized Anti-CD3 Part

[0268] In order to confirm the high bioactivity of the bispecific antibodies of the invention, a FACS based assay was carried out. CHO cells were transfected with epithelial cell adhesion molecule (EpCAM). A cell clone derived from this transfection, referred to as CHO-EpCAM cells, was used for the experiments.

[0269] For the cytotoxicity test, CHO-EpCAM (1.5×10⁷) cells were washed free of serum two times with PBS and incubated with PKH26 dye (Sigma-Aldrich Co.) according to the manufacturers instructions. After staining, cells were washed two times with RPMI/10% FCS.

[0270] Cells were counted and mixed with CB15 effector cells. The CD4-positive T cell clone CB15 was kindly provided by Dr. Fickenscher, University of Erlangen/Nuernberg, Germany. Cells were cultured as recommended by the suppliers. The resulting cell suspension contained 400.000 target and 2×10⁶ effector cells per ml. 50 μl of the mixture was used per well in a 96 well round bottom plate.

[0271] Antibodies were diluted in RPMI/10% FCS to the required concentration and 50 μl of this solution was added to the cell suspension. A standard reaction was incubated for 16 h at 37° C./5% CO₂. Propidium iodide was added to a final concentration of 1 μg/ml. After 10 min of incubation at room temperature cells were analysed by FACS. PKH26 fluorescence was used for positive identification of target cells. Cytotoxicity was measured as ratio of PI positive over all target cells.

[0272] Sigmoidal dose response curves typically had R2 values >0.97 as determined by Prism Software (GraphPad Software Inc., San Diego, USA). The results of the cytotoxic assays are shown in FIGS. 17 and 18.

### EXAMPLE 8.5

### Comparison of the Productivity of Bispecific Molecules Comprising an EpCAM Binding Part and a Deimmunized CD3 Binding Part in CHO Cells

[0273] In order to determine the productivity of a deimmunized construct protein L ELISA was performed. The productivity data was calculated from batch cultures.

### 8.5.1 Cell Culture

[0274] CHO cell lines producing deimmunized (CHO-DHFR-) and non-deimmunized (CHO-DHFR- or CHO-KL) were cultivated in HyQ PF CHO LS medium+4 mM L-Glutamine in a CO₂ incubator at 37° C. and ˜5% CO₂. Cell numbers and viability were determined using Trypan Blue. Cell density was set to 1−2×10⁵ cell/ml.

[0275] Cells were transferred to spinner flasks and thus adjusted to conditions of a stirred culture. Operational parameter settings were 80 rpm, 37° C. and 5% CO₂ with gassing in a CO₂ incubator. Culture volume was in the 100-500 ml-range and cell density at inoculation in the range of 1−2×10⁵ cells/ml. As for the subcultivation in T-flasks, cultures were centrifuged and resuspended in fresh pre-warmed medium at each passage. Cell density was set to 1−2×10⁵ cells/ml.

[0276] For analysis of productivity data (Table 15) cells were cultivated up to 14 days (d) without any medium addition or exchange. Cell numbers and viability were determined daily using Trypan blue stain. Product concentrations in the supernatant were analyzed by Protein L ELISA.

### 8.5.2 Protein L ELISA

[0277] Quantitative binding of the bispecific molecules was carried out with rProtein L-coated microtiter plates. rProtein L is a recombinant form of the immunoglobulin-binding Protein L produced by Peptostreptococcus magnus. It has four binding domains and binds immunoglobulin through the light chain (κ). Bispecific molecules, which contain variable domains from two different light chains respectively parent antibodies, are also bound by rProtein L.

[0278] Microtiter plates were coated with rProtein L in PBS buffer (2 μg rProtein L/ml PBS buffer) overnight at 2-8° C. Following coating, remaining adsorption sites were blocked with of blocking buffer (2% BSA in PBS buffer). Then, the plates were frozen and stored at <18° C. Before use, the plates were thawed and washed with washing buffer (0.05% Tween 20 in PBS buffer) to remove the mixture of coating solution and blocking buffer.

[0279] Serial dilutions of cell-free cell culture supernatant in 1% BSA+0.01% Tween 20 in PBS (dilution buffer) were analyzed. Bispecific anti-EpCAM(M79)×anti-CD3 was used as positive control in comparable dilutions.

### Incubation was Performed Overnight at 2-8° C.

[0280] After washing rabbit anti-mouse IgG (1:5,000 in dilution buffer) was added and incubated for 60 min at room temperature. Goat anti-rabbit IgG labeled with alkaline phosphatase was added (1:1,000 in dilution buffer; 60 min at room temperature) after washing. pNPP substrate solution was added and the reaction was stopped by addition of 3 M NaOH. Absorbance was measured with an ELISA reader at 405 nm (reference filter 492 nm).

TABLE 15
Productivity of an deimmunized anti-EpCAM construct

| | | | 5-10 × anti-CD3 |
|---|---|---|---|
| Construct | M79 × anti-anti-CD3 | | (VH5/VL2) |
| Basic cell line | CHO-K1 | CHO-dhfr- | CHO-dhfr- |
| Specific | 0.2-0.6 pg/ | 1-3 pg/cell | 15-20 pg/cell |
| productivity | cell per | per day | per day |
| | day | | |
| Maximal cell | 3 × 10⁶ c/ml | 1.2-1.8 × 10⁶ c/ml | 1.5 × 10⁶ c/ml |
| density | | | |
| Doubling time | 17-20 h | 25-30 h | 25-30 h |

[0281] Thus, the inventive 5-10×anti-CD3 (VH5/VL2) construct demonstrated much higher specific productivity (at least five times higher) than the prior art bispecific non-deimmunized EpCAM and CD3 binding antibody.

The application's sequence listing, which the Patent Office published only in electronic form, follows.

SEQUENCE LISTING (409 sequences)

SEQ ID NO: 1 - DNA, 729 bp, artificial sequence
  wt Anti-CD3 cassette
gatatcaaactgcagcagtcaggggctgaactggcaagacctggggcctcagtgaagatgtcctgcaagacttctggctacacctttactaggtacacgatgcactgggtaaaacagaggcctggacagggtctggaatggattggatacattaatcctagccgtggttatactaattacaatcagaagttcaaggacaaggccacattgactacagacaaatcctccagcacagcctacatgcaactgagcagcctgacatctgaggactctgcagtctattactgtgcaagatattatgatgatcattactgccttgactactggggccaaggcaccactctcacagtctcctcagtcgaaggtggaagtggaggttctggtggaagtggaggttcaggtggagtcgacgacattcagctgacccagtctccagcaatcatgtctgcatctccaggggagaaggtcaccatgacctgcagagccagttcaagtgtaagttacatgaactggtaccagcagaagtcaggcacctcccccaaaagatggatttatgacacatccaaagtggcttctggagtcccttatcgcttcagtggcagtgggtctgggacctcatactctctcacaatcagcagcatggaggctgaagatgctgccacttattactgccaacagtggagtagtaacccgctcacgttcggtgctgggaccaagctggagctgaaa

SEQ ID NO: 2 - protein, 243 aa, artificial sequence
  wt Anti-CD3 cassette
DIKLQQSGAELARPGASVKMSCKTSGYTFTRYTMHWVKQRPGQGLEWIGYINPSRGYTNYNQKFKDKATLTTDKSSSTAYMQLSSLTSEDSAVYYCARYYDDHYCLDYWGQGTTLTVSSVEGGSGGSGGSGGSGGVDDIQLTQSPAIMSASPGEKVTMTCRASSSVSYMNWYQQKSGTSPKRWIYDTSKVASGVPYRFSGSGSGTSYSLTISSMEAEDAATYYCQQWSSNPLTFGAGTKLELK

SEQ ID NO: 3 - protein, 18 aa, artificial sequence
  deimmunized linker
GEGTSTGSGGSGGSGGAD

SEQ ID NO: 4 - DNA, 729 bp, artificial sequence
  VH2/VL1
gacgtccaactggtgcagtcaggggctgaagtgaaaaaacctggggcctcagtgaaggtgtcctgcaaggcttctggctacaccgctactaggtacacgatgcactgggtaaggcaggcacctggacagggtctggaatggattggatacattaatcctagccgtggttatactaattacgcacagaagttgcagggccgcgtcacaatgactacagacacttccaccagcacagcctacatggaactgagcagcctgcgttctgaggacactgcaacctattactgtgcaagatattatgatgatcattactgccttgactactggggccaaggcaccacggtcaccgtctcctcaggcgaaggtactagtactggttctggtggaagtggaggttcaggtggagcagacgacattcagatgacccagtctccatctagcctgtctgcatctgtcggggaccgtgtcaccatcacctgcagagccagtcaaagtgtaagttacatgaactggtaccagcagaagccgggcaaggcacccaaaagatggatttatgacacatccaaagtggcttctggagtccctgctcgcttcagtggcagtgggtctgggaccgactactctctcacaatcaacagcttggaggctgaagatgctgccacttattactgccaacagtggagtagtaacccgctcacgttcggtggcgggaccaaggtggagatcaaa

SEQ ID NO: 5 - protein, 243 aa, artificial sequence
  VH2/VL1
DVQLVQSGAEVKKPGASVKVSCKASGYTATRYTMHWVRQAPGQGLEWIGYINPSRGYTNYAQKLQGRVTMTTDTSTSTAYMELSSLRSEDTATYYCARYYDDHYCLDYWGQGTTVTVSSGEGTSTGSGGSGGSGGADDIQMTQSPSSLSASVGDRVTITCRASQSVSYMNWYQQKPGKAPKRWIYDTSKVASGVPARFSGSGSGTDYSLTINSLEAEDAATYYCQQWSSNPLTFGGGTKVEIK

SEQ ID NO: 6 - DNA, 729 bp, artificial sequence
  VH2/VL2
gacgtccaactggtgcagtcaggggctgaagtgaaaaaacctggggcctcagtgaaggtgtcctgcaaggcttctggctacaccgctactaggtacacgatgcactgggtaaggcaggcacctggacagggtctggaatggattggatacattaatcctagccgtggttatactaattacgcacagaagttgcagggccgcgtcacaatgactacagacacttccaccagcacagcctacatggaactgagcagcctgcgttctgaggacactgcaacctattactgtgcaagatattatgatgatcattactgccttgactactggggccaaggcaccacggtcaccgtctcctcaggcgaaggtactagtactggttctggtggaagtggaggttcaggtggagcagacgacattgtactgacccagtctccagcaactctgtctctgtctccaggggagcgtgccaccctgagctgcagagccagtcaaagtgtaagttacatgaactggtaccagcagaagccgggcaaggcacccaaaagatggatttatgacacatccaaagtggcttctggagtccctgctcgcttcagtggcagtgggtctgggaccgactactctctcacaatcaacagcttggaggctgaagatgctgccacttattactgccaacagtggagtagtaacccgctcacgttcggtggcgggaccaaggtggagatcaaa

SEQ ID NO: 7 - protein, 243 aa, artificial sequence
  VH2/VL2
DVQLVQSGAEVKKPGASVKVSCKASGYTATRYTMHWVRQAPGQGLEWIGYINPSRGYTNYAQKLQGRVTMTTDTSTSTAYMELSSLRSEDTATYYCARYYDDHYCLDYWGQGTTVTVSSGEGTSTGSGGSGGSGGADDIVLTQSPATLSLSPGERATLSCRASQSVSYMNWYQQKPGKAPKRWIYDTSKVASGVPARFSGSGSGTDYSLTINSLEAEDAATYYCQQWSSNPLTFGGGTKVEIK

SEQ ID NO: 8 - DNA, 729 bp, artificial sequence
  VH2/VL3
gacgtccaactggtgcagtcaggggctgaagtgaaaaaacctggggcctcagtgaaggtgtcctgcaaggcttctggctacaccgctactaggtacacgatgcactgggtaaggcaggcacctggacagggtctggaatggattggatacattaatcctagccgtggttatactaattacgcacagaagttgcagggccgcgtcacaatgactacagacacttccaccagcacagcctacatggaactgagcagcctgcgttctgaggacactgcaacctattactgtgcaagatattatgatgatcattactgccttgactactggggccaaggcaccacggtcaccgtctcctcaggcgaaggtactagtactggttctggtggaagtggaggttcaggtggagcagacgacattgtactgacccagtctccagcaactctgtctctgtctccaggggagcgtgccaccctgacctgcagagccagttcaagtgtaagttacatgaactggtaccagcagaagccgggcaaggcacccaaaagatggatttatgacacatccaaagtggcttctggagtccctgctcgcttcagtggcagtgggtctgggaccgactactctctcacaatcaacagcttggaggctgaagatgctgccacttattactgccaacagtggagtagtaacccgctcacgttcggtggcgggaccaaggtggagatcaaa

SEQ ID NO: 9 - protein, 243 aa, artificial sequence
  VH2VL3
DVQLVQSGAEVKKPGASVKVSCKASGYTATRYTMHWVRQAPGQGLEWIGYINPSRGYTNYAQKLQGRVTMTTDTSTSTAYMELSSLRSEDTATYYCARYYDDHYCLDYWGQGTTVTVSSGEGTSTGSGGSGGSGGADDIVLTQSPATLSLSPGERATLTCRASSSVSYMNWYQQKPGKAPKRWIYDTSKVASGVPARFSGSGSGTDYSLTINSLEAEDAATYYCQQWSSNPLTFGGGTKVEIK

SEQ ID NO: 10 - DNA, 729 bp, artificial sequence
  VH3/VL1
gacgtccaactggtgcagtcaggggctgaagtgaaaaaacctggggcctcagtgaaggtgtcctgcaaggcttctggctacaccgctactaggtacacgatgcactgggtaaggcaggcacctggacagggtctggaatggattggatacattaatcctagccgtggttatactaattacgcacagaagttgcagggccgcgtcacaatgactacagacacttccaccagcacagcctacctgcaaatgaacagcctgaaaactgaggacactgcagtctattactgtgcaagatattatgatgatcattactgccttgactactggggccaaggcaccacggtcaccgtctcctcaggcgaaggtactagtactggttctggtggaagtggaggttcaggtggagcagacgacattcagatgacccagtctccatctagcctgtctgcatctgtcggggaccgtgtcaccatcacctgcagagccagtcaaagtgtaagttacatgaactggtaccagcagaagccgggcaaggcacccaaaagatggatttatgacacatccaaagtggcttctggagtccctgctcgcttcagtggcagtgggtctgggaccgactactctctcacaatcaacagcttggaggctgaagatgctgccacttattactgccaacagtggagtagtaacccgctcacgttcggtggcgggaccaaggtggagatcaaa

SEQ ID NO: 11 - protein, 243 aa, artificial sequence
  VH3/VL1
DVQLVQSGAEVKKPGASVKVSCKASGYTATRYTMHWVRQAPGQGLEWIGYINPSRGYTNYAQKLQGRVTMTTDTSTSTAYLQMNSLKTEDTAVYYCARYYDDHYCLDYWGQGTTVTVSSGEGTSTGSGGSGGSGGADDIQMTQSPSSLSASVGDRVTITCRASQSVSYMNWYQQKPGKAPKRWIYDTSKVASGVPARFSGSGSGTDYSLTINSLEAEDAATYYCQQWSSNPLTFGGGTKVEIK

SEQ ID NO: 12 - DNA, 729 bp, artificial sequence
  VH3/VL2
gacgtccaactggtgcagtcaggggctgaagtgaaaaaacctggggcctcagtgaaggtgtcctgcaaggcttctggctacaccgctactaggtacacgatgcactgggtaaggcaggcacctggacagggtctggaatggattggatacattaatcctagccgtggttatactaattacgcacagaagttgcagggccgcgtcacaatgactacagacacttccaccagcacagcctacctgcaaatgaacagcctgaaaactgaggacactgcagtctattactgtgcaagatattatgatgatcattactgccttgactactggggccaaggcaccacggtcaccgtctcctcaggcgaaggtactagtactggttctggtggaagtggaggttcaggtggagcagacgacattgtactgacccagtctccagcaactctgtctctgtctccaggggagcgtgccaccctgagctgcagagccagtcaaagtgtaagttacatgaactggtaccagcagaagccgggcaaggcacccaaaagatggatttatgacacatccaaagtggcttctggagtccctgctcgcttcagtggcagtgggtctgggaccgactactctctcacaatcaacagcttggaggctgaagatgctgccacttattactgccaacagtggagtagtaacccgctcacgttcggtggcgggaccaaggtggagatcaaa

SEQ ID NO: 13 - protein, 243 aa, artificial sequence
  VH3/VL2
DVQLVQSGAEVKKPGASVKVSCKASGYTATRYTMHWVRQAPGQGLEWIGYINPSRGYTNYAQKLQGRVTMTTDTSTSTAYLQMNSLKTEDTAVYYCARYYDDHYCLDYWGQGTTVTVSSGEGTSTGSGGSGGSGGADDIVLTQSPATLSLSPGERATLSCRASQSVSYMNWYQQKPGKAPKRWIYDTSKVASGVPARFSGSGSGTDYSLTINSLEAEDAATYYCQQWSSNPLTFGGGTKVEIK

SEQ ID NO: 14 - DNA, 729 bp, artificial sequence
  VH3/VL3
gacgtccaactggtgcagtcaggggctgaagtgaaaaaacctggggcctcagtgaaggtgtcctgcaaggcttctggctacaccgctactaggtacacgatgcactgggtaaggcaggcacctggacagggtctggaatggattggatacattaatcctagccgtggttatactaattacgcacagaagttgcagggccgcgtcacaatgactacagacacttccaccagcacagcctacctgcaaatgaacagcctgaaaactgaggacactgcagtctattactgtgcaagatattatgatgatcattactgccttgactactggggccaaggcaccacggtcaccgtctcctcaggcgaaggtactagtactggttctggtggaagtggaggttcaggtggagcagacgacattgtactgacccagtctccagcaactctgtctctgtctccaggggagcgtgccaccctgacctgcagagccagttcaagtgtaagttacatgaactggtaccagcagaagccgggcaaggcacccaaaagatggatttatgacacatccaaagtggcttctggagtccctgctcgcttcagtggcagtgggtctgggaccgactactctctcacaatcaacagcttggaggctgaagatgctgccacttattactgccaacagtggagtagtaacccgctcacgttcggtggcgggaccaaggtggagatcaaa

SEQ ID NO: 15 - protein, 243 aa, artificial sequence
  VH3/VL3
DVQLVQSGAEVKKPGASVKVSCKASGYTATRYTMHWVRQAPGQGLEWIGYINPSRGYTNYAQKLQGRVTMTTDTSTSTAYLQMNSLKTEDTAVYYCARYYDDHYCLDYWGQGTTVTVSSGEGTSTGSGGSGGSGGADDIVLTQSPATLSLSPGERATLTCRASSSVSYMNWYQQKPGKAPKRWIYDTSKVASGVPARFSGSGSGTDYSLTINSLEAEDAATYYCQQWSSNPLTFGGGTKVEIK

SEQ ID NO: 16 - DNA, 729 bp, artificial sequence
  VH5/VL1
gacgtccaactggtgcagtcaggggctgaagtgaaaaaacctggggcctcagtgaaggtgtcctgcaaggcttctggctacacctttactaggtacacgatgcactgggtaaggcaggcacctggacagggtctggaatggattggatacattaatcctagccgtggttatactaattacgcagacagcgtcaagggccgcttcacaatcactacagacaaatccaccagcacagcctacatggaactgagcagcctgcgttctgaggacactgcaacctattactgtgcaagatattatgatgatcattactgccttgactactggggccaaggcaccacggtcaccgtctcctcaggcgaaggtactagtactggttctggtggaagtggaggttcaggtggagcagacgacattcagatgacccagtctccatctagcctgtctgcatctgtcggggaccgtgtcaccatcacctgcagagccagtcaaagtgtaagttacatgaactggtaccagcagaagccgggcaaggcacccaaaagatggatttatgacacatccaaagtggcttctggagtccctgctcgcttcagtggcagtgggtctgggaccgactactctctcacaatcaacagcttggaggctgaagatgctgccacttattactgccaacagtggagtagtaacccgctcacgttcggtggcgggaccaaggtggagatcaaa

SEQ ID NO: 17 - protein, 243 aa, artificial sequence
  VH5/VL1
DVQLVQSGAEVKKPGASVKVSCKASGYTFTRYTMHWVRQAPGQGLEWIGYINPSRGYTNYADSVKGRFTITTDKSTSTAYMELSSLRSEDTATYYCARYYDDHYCLDYWGQGTTVTVSSGEGTSTGSGGSGGSGGADDIQMTQSPSSLSASVGDRVTITCRASQSVSYMNWYQQKPGKAPKRWIYDTSKVASGVPARFSGSGSGTDYSLTINSLEAEDAATYYCQQWSSNPLTFGGGTKVEIK

SEQ ID NO: 18 - DNA, 729 bp, artificial sequence
  VH5/VL2
gacgtccaactggtgcagtcaggggctgaagtgaaaaaacctggggcctcagtgaaggtgtcctgcaaggcttctggctacacctttactaggtacacgatgcactgggtaaggcaggcacctggacagggtctggaatggattggatacattaatcctagccgtggttatactaattacgcagacagcgtcaagggccgcttcacaatcactacagacaaatccaccagcacagcctacatggaactgagcagcctgcgttctgaggacactgcaacctattactgtgcaagatattatgatgatcattactgccttgactactggggccaaggcaccacggtcaccgtctcctcaggcgaaggtactagtactggttctggtggaagtggaggttcaggtggagcagacgacattgtactgacccagtctccagcaactctgtctctgtctccaggggagcgtgccaccctgagctgcagagccagtcaaagtgtaagttacatgaactggtaccagcagaagccgggcaaggcacccaaaagatggatttatgacacatccaaagtggcttctggagtccctgctcgcttcagtggcagtgggtctgggaccgactactctctcacaatcaacagcttggaggctgaagatgctgccacttattactgccaacagtggagtagtaacccgctcacgttcggtggcgggaccaaggtggagatcaaa

SEQ ID NO: 19 - protein, 243 aa, artificial sequence
  VH5/VL2
DVQLVQSGAEVKKPGASVKVSCKASGYTFTRYTMHWVRQAPGQGLEWIGYINPSRGYTNYADSVKGRFTITTDKSTSTAYMELSSLRSEDTATYYCARYYDDHYCLDYWGQGTTVTVSSGEGTSTGSGGSGGSGGADDIVLTQSPATLSLSPGERATLSCRASQSVSYMNWYQQKPGKAPKRWIYDTSKVASGVPARFSGSGSGTDYSLTINSLEAEDAATYYCQQWSSNPLTFGGGTKVEIK

SEQ ID NO: 20 - DNA, 729 bp, artificial sequence
  VH5/VL3
gacgtccaactggtgcagtcaggggctgaagtgaaaaaacctggggcctcagtgaaggtgtcctgcaaggcttctggctacacctttactaggtacacgatgcactgggtaaggcaggcacctggacagggtctggaatggattggatacattaatcctagccgtggttatactaattacgcagacagcgtcaagggccgcttcacaatcactacagacaaatccaccagcacagcctacatggaactgagcagcctgcgttctgaggacactgcaacctattactgtgcaagatattatgatgatcattactgccttgactactggggccaaggcaccacggtcaccgtctcctcaggcgaaggtactagtactggttctggtggaagtggaggttcaggtggagcagacgacattgtactgacccagtctccagcaactctgtctctgtctccaggggagcgtgccaccctgacctgcagagccagttcaagtgtaagttacatgaactggtaccagcagaagccgggcaaggcacccaaaagatggatttatgacacatccaaagtggcttctggagtccctgctcgcttcagtggcagtgggtctgggaccgactactctctcacaatcaacagcttggaggctgaagatgctgccacttattactgccaacagtggagtagtaacccgctcacgttcggtggcgggaccaaggtggagatcaaa

SEQ ID NO: 21 - protein, 243 aa, artificial sequence
  VH5/VL3
DVQLVQSGAEVKKPGASVKVSCKASGYTFTRYTMHWVRQAPGQGLEWIGYINPSRGYTNYADSVKGRFTITTDKSTSTAYMELSSLRSEDTATYYCARYYDDHYCLDYWGQGTTVTVSSGEGTSTGSGGSGGSGGADDIVLTQSPATLSLSPGERATLTCRASSSVSYMNWYQQKPGKAPKRWIYDTSKVASGVPARFSGSGSGTDYSLTINSLEAEDAATYYCQQWSSNPLTFGGGTKVEIK

SEQ ID NO: 22 - DNA, 729 bp, artificial sequence
  VH7/VL1
gacgtccaactggtgcagtcaggggctgaagtgaaaaaacctggggcctcagtgaaggtgtcctgcaaggcttctggctacacctttactaggtacacgatgcactgggtaaggcaggcacctggacagggtctggaatggattggatacattaatcctagccgtggttatactaattacaatcagaagttcaaggaccgcgtcacaatcactacagacaaatccaccagcacagcctacatggaactgagcagcctgcgttctgaggacactgcagtctattactgtgcaagatattatgatgatcattactgccttgactactggggccaaggcaccacggtcaccgtctcctcaggcgaaggtactagtactggttctggtggaagtggaggttcaggtggagcagacgacattcagatgacccagtctccatctagcctgtctgcatctgtcggggaccgtgtcaccatcacctgcagagccagtcaaagtgtaagttacatgaactggtaccagcagaagccgggcaaggcacccaaaagatggatttatgacacatccaaagtggcttctggagtccctgctcgcttcagtggcagtgggtctgggaccgactactctctcacaatcaacagcttggaggctgaagatgctgccacttattactgccaacagtggagtagtaacccgctcacgttcggtggcgggaccaaggtggagatcaaa

SEQ ID NO: 23 - protein, 243 aa, artificial sequence
  VH7/VL1
DVQLVQSGAEVKKPGASVKVSCKASGYTFTRYTMHWVRQAPGQGLEWIGYINPSRGYTNYNQKFKDRVTITTDKSTSTAYMELSSLRSEDTAVYYCARYYDDHYCLDYWGQGTTVTVSSGEGTSTGSGGSGGSGGADDIQMTQSPSSLSASVGDRVTITCRASQSVSYMNWYQQKPGKAPKRWIYDTSKVASGVPARFSGSGSGTDYSLTINSLEAEDAATYYCQQWSSNPLTFGGGTKVEIK

SEQ ID NO: 24 - DNA, 729 bp, artificial sequence
  VH7/VL2
gacgtccaactggtgcagtcaggggctgaagtgaaaaaacctggggcctcagtgaaggtgtcctgcaaggcttctggctacacctttactaggtacacgatgcactgggtaaggcaggcacctggacagggtctggaatggattggatacattaatcctagccgtggttatactaattacaatcagaagttcaaggaccgcgtcacaatcactacagacaaatccaccagcacagcctacatggaactgagcagcctgcgttctgaggacactgcagtctattactgtgcaagatattatgatgatcattactgccttgactactggggccaaggcaccacggtcaccgtctcctcaggcgaaggtactagtactggttctggtggaagtggaggttcaggtggagcagacgacattgtactgacccagtctccagcaactctgtctctgtctccaggggagcgtgccaccctgagctgcagagccagtcaaagtgtaagttacatgaactggtaccagcagaagccgggcaaggcacccaaaagatggatttatgacacatccaaagtggcttctggagtccctgctcgcttcagtggcagtgggtctgggaccgactactctctcacaatcaacagcttggaggctgaagatgctgccacttattactgccaacagtggagtagtaacccgctcacgttcggtggcgggaccaaggtggagatcaaa

SEQ ID NO: 25 - protein, 243 aa, artificial sequence
  VH7/VL2
DVQLVQSGAEVKKPGASVKVSCKASGYTFTRYTMHWVRQAPGQGLEWIGYINPSRGYTNYNQKFKDRVTITTDKSTSTAYMELSSLRSEDTAVYYCARYYDDHYCLDYWGQGTTVTVSSGEGTSTGSGGSGGSGGADDIVLTQSPATLSLSPGERATLSCRASQSVSYMNWYQQKPGKAPKRWIYDTSKVASGVPARFSGSGSGTDYSLTINSLEAEDAATYYCQQWSSNPLTFGGGTKVEIK

SEQ ID NO: 26 - DNA, 729 bp, artificial sequence
  VH7/VL3
gacgtccaactggtgcagtcaggggctgaagtgaaaaaacctggggcctcagtgaaggtgtcctgcaaggcttctggctacacctttactaggtacacgatgcactgggtaaggcaggcacctggacagggtctggaatggattggatacattaatcctagccgtggttatactaattacaatcagaagttcaaggaccgcgtcacaatcactacagacaaatccaccagcacagcctacatggaactgagcagcctgcgttctgaggacactgcagtctattactgtgcaagatattatgatgatcattactgccttgactactggggccaaggcaccacggtcaccgtctcctcaggcgaaggtactagtactggttctggtggaagtggaggttcaggtggagcagacgacattgtactgacccagtctccagcaactctgtctctgtctccaggggagcgtgccaccctgacctgcagagccagttcaagtgtaagttacatgaactggtaccagcagaagccgggcaaggcacccaaaagatggatttatgacacatccaaagtggcttctggagtccctgctcgcttcagtggcagtgggtctgggaccgactactctctcacaatcaacagcttggaggctgaagatgctgccacttattactgccaacagtggagtagtaacccgctcacgttcggtggcgggaccaaggtggagatcaaa

SEQ ID NO: 27 - protein, 243 aa, artificial sequence
  VH7/VL3
DVQLVQSGAEVKKPGASVKVSCKASGYTFTRYTMHWVRQAPGQGLEWIGYINPSRGYTNYNQKFKDRVTITTDKSTSTAYMELSSLRSEDTAVYYCARYYDDHYCLDYWGQGTTVTVSSGEGTSTGSGGSGGSGGADDIVLTQSPATLSLSPGERATLTCRASSSVSYMNWYQQKPGKAPKRWIYDTSKVASGVPARFSGSGSGTDYSLTINSLEAEDAATYYCQQWSSNPLTFGGGTKVEIK

SEQ ID NO: 28 - DNA, 20 bp, artificial sequence
  Sequencing primer
cctcagacagtggttcaaag

SEQ ID NO: 29 - DNA, 18 bp, artificial sequence
  Sequencing primer
agccgccacgtgggcctc

SEQ ID NO: 30 - DNA, 1473 bp, artificial sequence
  anti-CD3 VH5/VL2 x 3-1 VHVL
gacgtccaactggtgcagtcaggggctgaagtgaaaaaacctggggcctcagtgaaggtgtcctgcaaggcttctggctacacctttactaggtacacgatgcactgggtaaggcaggcacctggacagggtctggaatggattggatacattaatcctagccgtggttatactaattacgcagacagcgtcaagggccgcttcacaatcactacagacaaatccaccagcacagcctacatggaactgagcagcctgcgttctgaggacactgcaacctattactgtgcaagatattatgatgatcattactgccttgactactggggccaaggcaccacggtcaccgtctcctcaggcgaaggtactagtactggttctggtggaagtggaggttcaggtggagcagacgacattgtactgacccagtctccagcaactctgtctctgtctccaggggagcgtgccaccctgagctgcagagccagtcaaagtgtaagttacatgaactggtaccagcagaagccgggcaaggcacccaaaagatggatttatgacacatccaaagtggcttctggagtccctgctcgcttcagtggcagtgggtctgggaccgactactctctcacaatcaacagcttggaggctgaagatgctgccacttattactgccaacagtggagtagtaacccgctcacgttcggtggcgggaccaaggtggagatcaaatccggaggtggtggatccgaggtgcagctgctcgagcagtctggagctgagctggtgaaacctggggcctcagtgaagatatcctgcaaggcttctggatacgccttcactaactactggctaggttgggtaaagcagaggcctggacatggacttgagtggattggagatcttttccctggaagtggtaatactcactacaatgagaggttcaggggcaaagccacactgactgcagacaaatcctcgagcacagcctttatgcagctcagtagcctgacatctgaggactctgctgtctatttctgtgcaagattgaggaactgggacgaggctatggactactggggccaagggaccacggtcaccgtctcctcaggtggtggtggttctggcggcggcggctccggtggtggtggttctgagctcgtcatgacccagtctccatcttatcttgctgcatctcctggagaaaccattactattaattgcagggcaagtaagagcattagcaaatatttagcctggtatcaagagaaacctgggaaaactaataagcttcttatctactctggatccactttgcaatctggaattccatcaaggttcagtggcagtggatctggtacagatttcactctcaccatcagtagcctggagcctgaagattttgcaatgtattactgtcaacagcataatgaatatccgtacacgttcggaggggggaccaagcttgagatcaaa

SEQ ID NO: 31 - protein, 491 aa, artificial sequence
  anti-CD3 VH5/VL2 x 3-1 VHVL
DVQLVQSGAEVKKPGASVKVSCKASGYTFTRYTMHWVRQAPGQGLEWIGYINPSRGYTNYADSVKGRFTITTDKSTSTAYMELSSLRSEDTATYYCARYYDDHYCLDYWGQGTTVTVSSGEGTSTGSGGSGGSGGADDIVLTQSPATLSLSPGERATLSCRASQSVSYMNWYQQKPGKAPKRWIYDTSKVASGVPARFSGSGSGTDYSLTINSLEAEDAATYYCQQWSSNPLTFGGGTKVEIKSGGGGSEVQLLEQSGAELVKPGASVKISCKASGYAFTNYWLGWVKQRPGHGLEWIGDLFPGSGNTHYNERFRGKATLTADKSSSTAFMQLSSLTSEDSAVYFCARLRNWDEAMDYWGQGTTVTVSSGGGGSGGGGSGGGGSELVMTQSPSYLAASPGETITINCRASKSISKYLAWYQEKPGKTNKLLIYSGSTLQSGIPSRFSGSGSGTDFTLTISSLEPEDFAMYYCQQHNEYPYTFGGGTKLEIK

SEQ ID NO: 32 - DNA, 1500 bp, artificial sequence
  anti-CD3 VH5/VL2 x 4-7 VHVL
gacgtccaactggtgcagtcaggggctgaagtgaaaaaacctggggcctcagtgaaggtgtcctgcaaggcttctggctacacctttactaggtacacgatgcactgggtaaggcaggcacctggacagggtctggaatggattggatacattaatcctagccgtggttatactaattacgcagacagcgtcaagggccgcttcacaatcactacagacaaatccaccagcacagcctacatggaactgagcagcctgcgttctgaggacactgcaacctattactgtgcaagatattatgatgatcattactgccttgactactggggccaaggcaccacggtcaccgtctcctcaggcgaaggtactagtactggttctggtggaagtggaggttcaggtggagcagacgacattgtactgacccagtctccagcaactctgtctctgtctccaggggagcgtgccaccctgagctgcagagccagtcaaagtgtaagttacatgaactggtaccagcagaagccgggcaaggcacccaaaagatggatttatgacacatccaaagtggcttctggagtccctgctcgcttcagtggcagtgggtctgggaccgactactctctcacaatcaacagcttggaggctgaagatgctgccacttattactgccaacagtggagtagtaacccgctcacgttcggtggcgggaccaaggtggagatcaaatccggaggtggtggatccgaggtgcagctgctcgagcagtctggagctgagctggcgaggcctggggcttcagtgaagctgtcctgcaaggcttctggctacaccttcacaaactatggtttaagctgggtgaagcagaggcctggacaggtccttgagtggattggagaggtttatcctagaattggtaatgcttactacaatgagaagttcaagggcaaggccacactgactgcagacaaatcctccagcacagcgtccatggagctccgcagcctgacctctgaggactctgcggtctatttctgtgcaagacggggatcctacgatactaactacgactggtacttcgatgtctggggccaagggaccacggtcaccgtctcctcaggtggtggtggttctggcggcggcggctccggtggtggtggttctgagctcgtgatgacccagactccactctccctgcctgtcagtcttggagatcaagcctccatctcttgcagatctagtcagagccttgtacacagtaatggaaacacctatttacattggtacctgcagaagccaggccagtctccaaagctcctgatctacaaagtttccaaccgattttctggggtcccagacaggttcagtggcagtggatcagggacagatttcacactcaagatcagcagagtggaggctgaggatctgggagtttatttctgctctcaaagtacacatgttccgtacacgttcggaggggggaccaagcttgagatcaaa

SEQ ID NO: 33 - protein, 500 aa, artificial sequence
  anti-CD3 VH5/VL2 x 4-7 VHVL
DVQLVQSGAEVKKPGASVKVSCKASGYTFTRYTMHWVRQAPGQGLEWIGYINPSRGYTNYADSVKGRFTITTDKSTSTAYMELSSLRSEDTATYYCARYYDDHYCLDYWGQGTTVTVSSGEGTSTGSGGSGGSGGADDIVLTQSPATLSLSPGERATLSCRASQSVSYMNWYQQKPGKAPKRWIYDTSKVASGVPARFSGSGSGTDYSLTINSLEAEDAATYYCQQWSSNPLTFGGGTKVEIKSGGGGSEVQLLEQSGAELARPGASVKLSCKASGYTFTNYGLSWVKQRPGQVLEWIGEVYPRIGNAYYNEKFKGKATLTADKSSSTASMELRSLTSEDSAVYFCARRGSYDTNYDWYFDVWGQGTTVTVSSGGGGSGGGGSGGGGSELVMTQTPLSLPVSLGDQASISCRSSQSLVHSNGNTYLHWYLQKPGQSPKLLIYKVSNRFSGVPDRFSGSGSGTDFTLKISRVEAEDLGVYFCSQSTHVPYTFGGGTKLEIK

SEQ ID NO: 34 - DNA, 1500 bp, artificial sequence
  anti-CD3 VH5/VL2 x 4-7 VLVH
gacgtccaactggtgcagtcaggggctgaagtgaaaaaacctggggcctcagtgaaggtgtcctgcaaggcttctggctacacctttactaggtacacgatgcactgggtaaggcaggcacctggacagggtctggaatggattggatacattaatcctagccgtggttatactaattacgcagacagcgtcaagggccgcttcacaatcactacagacaaatccaccagcacagcctacatggaactgagcagcctgcgttctgaggacactgcaacctattactgtgcaagatattatgatgatcattactgccttgactactggggccaaggcaccacggtcaccgtctcctcaggcgaaggtactagtactggttctggtggaagtggaggttcaggtggagcagacgacattgtactgacccagtctccagcaactctgtctctgtctccaggggagcgtgccaccctgagctgcagagccagtcaaagtgtaagttacatgaactggtaccagcagaagccgggcaaggcacccaaaagatggatttatgacacatccaaagtggcttctggagtccctgctcgcttcagtggcagtgggtctgggaccgactactctctcacaatcaacagcttggaggctgaagatgctgccacttattactgccaacagtggagtagtaacccgctcacgttcggtggcgggaccaaggtggagatcaaatccggaggtggtggatccgagctcgtgatgacccagactccactctccctgcctgtcagtcttggagatcaagcctccatctcttgcagatctagtcagagccttgtacacagtaatggaaacacctatttacattggtacctgcagaagccaggccagtctccaaagctcctgatctacaaagtttccaaccgattttctggggtcccagacaggttcagtggcagtggatcagggacagatttcacactcaagatcagcagagtggaggctgaggatctgggagtttatttctgctctcaaagtacacatgttccgtacacgttcggaggggggaccaagcttgagatcaaaggtggtggtggttctggcggcggcggctccggtggtggtggttctgaggtgcagctgctcgagcagtctggagctgagctggcgaggcctggggcttcagtgaagctgtcctgcaaggcttctggctacaccttcacaaactatggtttaagctgggtgaagcagaggcctggacaggtccttgagtggattggagaggtttatcctagaattggtaatgcttactacaatgagaagttcaagggcaaggccacactgactgcagacaaatcctccagcacagcgtccatggagctccgcagcctgacctctgaggactctgcggtctatttctgtgcaagacggggatcctacgatactaactacgactggtacttcgatgtctggggccaagggaccacggtcaccgtctcctca

SEQ ID NO: 35 - protein, 500 aa, artificial sequence
  anti-CD3 VH5/VL2 x 4-7 VLVH
DVQLVQSGAEVKKPGASVKVSCKASGYTFTRYTMHWVRQAPGQGLEWIGYINPSRGYTNYADSVKGRFTITTDKSTSTAYMELSSLRSEDTATYYCARYYDDHYCLDYWGQGTTVTVSSGEGTSTGSGGSGGSGGADDIVLTQSPATLSLSPGERATLSCRASQSVSYMNWYQQKPGKAPKRWIYDTSKVASGVPARFSGSGSGTDYSLTINSLEAEDAATYYCQQWSSNPLTFGGGTKVEIKSGGGGSELVMTQTPLSLPVSLGDQASISCRSSQSLVHSNGNTYLHWYLQKPGQSPKLLIYKVSNRFSGVPDRFSGSGSGTDFTLKISRVEAEDLGVYFCSQSTHVPYTFGGGTKLEIKGGGGSGGGGSGGGGSEVQLLEQSGAELARPGASVKLSCKASGYTFTNYGLSWVKQRPGQVLEWIGEVYPRIGNAYYNEKFKGKATLTADKSSSTASMELRSLTSEDSAVYFCARRGSYDTNYDWYFDVWGQGTTVTVSS

SEQ ID NO: 36 - DNA, 1491 bp, artificial sequence
  anti-CD3 VH5/VL2 x 5-10 VHVL
gacgtccaactggtgcagtcaggggctgaagtgaaaaaacctggggcctcagtgaaggtgtcctgcaaggcttctggctacacctttactaggtacacgatgcactgggtaaggcaggcacctggacagggtctggaatggattggatacattaatcctagccgtggttatactaattacgcagacagcgtcaagggccgcttcacaatcactacagacaaatccaccagcacagcctacatggaactgagcagcctgcgttctgaggacactgcaacctattactgtgcaagatattatgatgatcattactgccttgactactggggccaaggcaccacggtcaccgtctcctcaggcgaaggtactagtactggttctggtggaagtggaggttcaggtggagcagacgacattgtactgacccagtctccagcaactctgtctctgtctccaggggagcgtgccaccctgagctgcagagccagtcaaagtgtaagttacatgaactggtaccagcagaagccgggcaaggcacccaaaagatggatttatgacacatccaaagtggcttctggagtccctgctcgcttcagtggcagtgggtctgggaccgactactctctcacaatcaacagcttggaggctgaagatgctgccacttattactgccaacagtggagtagtaacccgctcacgttcggtggcgggaccaaggtggagatcaaatccggaggtggtggatccgaggtgcagctgctcgagcagtctggagctgagctggtaaggcctgggacttcagtgaagatatcctgcaaggcttctggatacgccttcactaactactggctaggttgggtaaagcagaggcctggacatggacttgagtggattggagatattttccctggaagtggtaatatccactacaatgagaagttcaagggcaaagccacactgactgcagacaaatcttcgagcacagcctatatgcagctcagtagcctgacatttgaggactctgctgtctatttctgtgcaagactgaggaactgggacgagcctatggactactggggccaagggaccacggtcaccgtctcctcaggtggtggtggttctggcggcggcggctccggtggtggtggttctgagctcgtgatgacacagtctccatcctccctgactgtgacagcaggagagaaggtcactatgagctgcaagtccagtcagagtctgttaaacagtggaaatcaaaagaactacttgacctggtaccagcagaaaccagggcagcctcctaaactgttgatctactgggcatccactagggaatctggggtccctgatcgcttcacaggcagtggatctggaacagatttcactctcaccatcagcagtgtgcaggctgaagacctggcagtttattactgtcagaatgattatagttatccgctcacgttcggtgctgggaccaagcttgagatcaaa

SEQ ID NO: 37 - protein, 497 aa, artificial sequence
  anti-CD3 VH5/VL2 x 5-10 VHVL
DVQLVQSGAEVKKPGASVKVSCKASGYTFTRYTMHWVRQAPGQGLEWIGYINPSRGYTNYADSVKGRFTITTDKSTSTAYMELSSLRSEDTATYYCARYYDDHYCLDYWGQGTTVTVSSGEGTSTGSGGSGGSGGADDIVLTQSPATLSLSPGERATLSCRASQSVSYMNWYQQKPGKAPKRWIYDTSKVASGVPARFSGSGSGTDYSLTINSLEAEDAATYYCQQWSSNPLTFGGGTKVEIKSGGGGSEVQLLEQSGAELVRPGTSVKISCKASGYAFTNYWLGWVKQRPGHGLEWIGDIFPGSGNIHYNEKFKGKATLTADKSSSTAYMQLSSLTFEDSAVYFCARLRNWDEPMDYWGQGTTVTVSSGGGGSGGGGSGGGGSELVMTQSPSSLTVTAGEKVTMSCKSSQSLLNSGNQKNYLTWYQQKPGQPPKLLIYWASTRESGVPDRFTGSGSGTDFTLTISSVQAEDLAVYYCQNDYSYPLTFGAGTKLEIK

SEQ ID NO: 38 - DNA, 1491 bp, artificial sequence
  anti-CD3 VH5/VL2 x 5-10 VLVH
gacgtccaactggtgcagtcaggggctgaagtgaaaaaacctggggcctcagtgaaggtgtcctgcaaggcttctggctacacctttactaggtacacgatgcactgggtaaggcaggcacctggacagggtctggaatggattggatacattaatcctagccgtggttatactaattacgcagacagcgtcaagggccgcttcacaatcactacagacaaatccaccagcacagcctacatggaactgagcagcctgcgttctgaggacactgcaacctattactgtgcaagatattatgatgatcattactgccttgactactggggccaaggcaccacggtcaccgtctcctcaggcgaaggtactagtactggttctggtggaagtggaggttcaggtggagcagacgacattgtactgacccagtctccagcaactctgtctctgtctccaggggagcgtgccaccctgagctgcagagccagtcaaagtgtaagttacatgaactggtaccagcagaagccgggcaaggcacccaaaagatggatttatgacacatccaaagtggcttctggagtccctgctcgcttcagtggcagtgggtctgggaccgactactctctcacaatcaacagcttggaggctgaagatgctgccacttattactgccaacagtggagtagtaacccgctcacgttcggtggcgggaccaaggtggagatcaaatccggaggtggtggatccgagctcgtgatgacacagtctccatcctccctgactgtgacagcaggagagaaggtcactatgagctgcaagtccagtcagagtctgttaaacagtggaaatcaaaagaactacttgacctggtaccagcagaaaccagggcagcctcctaaactgttgatctactgggcatccactagggaatctggggtccctgatcgcttcacaggcagtggatctggaacagatttcactctcaccatcagcagtgtgcaggctgaagacctggcagtttattactgtcagaatgattatagttatccgctcacgttcggtgctgggaccaagcttgagatcaaaggtggtggtggttctggcggcggcggctccggtggtggtggttctgaggtgcagctgctcgagcagtctggagctgagctggtaaggcctgggacttcagtgaagatatcctgcaaggcttctggatacgccttcactaactactggctaggttgggtaaagcagaggcctggacatggacttgagtggattggagatattttccctggaagtggtaatatccactacaatgagaagttcaagggcaaagccacactgactgcagacaaatcttcgagcacagcctatatgcagctcagtagcctgacatttgaggactctgctgtctatttctgtgcaagactgaggaactgggacgagcctatggactactggggccaagggaccacggtcaccgtctcctca

SEQ ID NO: 39 - protein, 497 aa, artificial sequence
  anti-CD3 VH5/VL2 x 5-10 VLVH
DVQLVQSGAEVKKPGASVKVSCKASGYTFTRYTMHWVRQAPGQGLEWIGYINPSRGYTNYADSVKGRFTITTDKSTSTAYMELSSLRSEDTATYYCARYYDDHYCLDYWGQGTTVTVSSGEGTSTGSGGSGGSGGADDIVLTQSPATLSLSPGERATLSCRASQSVSYMNWYQQKPGKAPKRWIYDTSKVASGVPARFSGSGSGTDYSLTINSLEAEDAATYYCQQWSSNPLTFGGGTKVEIKSGGGGSELVMTQSPSSLTVTAGEKVTMSCKSSQSLLNSGNQKNYLTWYQQKPGQPPKLLIYWASTRESGVPDRFTGSGSGTDFTLTISSVQAEDLAVYYCQNDYSYPLTFGAGTKLEIKGGGGSGGGGSGGGGSEVQLLEQSGAELVRPGTSVKISCKASGYAFTNYWLGWVKQRPGHGLEWIGDIFPGSGNIHYNEKFKGKATLTADKSSSTAYMQLSSLTFEDSAVYFCARLRNWDEPMDYWGQGTTVTVSS

SEQ ID NO: 40 - DNA, 35 bp, artificial sequence
  DI anti-CD3 K52VHBsrGI
aggtgtacactccgacgtccaactggtgcagtcag

SEQ ID NO: 41 - DNA, 30 bp, artificial sequence
  DI anti-CD3 52VLBspEI
aatccggatttgatctccaccttggtcccg

SEQ ID NO: 42 - DNA, 51 bp, artificial sequence
  4-7 VH GS15 FOR
ggcggcggcggctccggtggtggtggttctgaggtgcagctgctcgagcag

SEQ ID NO: 43 - DNA, 53 bp, artificial sequence
  4-7 VH SalI REV
ttttaagtcgacctaatgatgatgatgatgatgtgaggagacggtgaccgtgg

SEQ ID NO: 44 - DNA, 49 bp, artificial sequence
  510VLBspEI
ctgaaatccggaggtggtggatccgagctcgtgatgacacagtctccat

SEQ ID NO: 45 - DNA, 53 bp, artificial sequence
  510VLGS15REV
ggagccgccgccgccagaaccaccaccacctttgatctcaagcttggtcccag

SEQ ID NO: 46 - DNA, 49 bp, artificial sequence
  510VHGS15
ggcggcggcggctccggtggtggtggttctgaggtgcagctgctcgagc

SEQ ID NO: 47 - DNA, 53 bp, artificial sequence; identical to SEQ ID NO: 43
  510VHSalIREV

SEQ ID NO: 48 - DNA, 1518 bp, artificial sequence
  3-1(VL-VH)xanti-CD3(VH(5)-VL(2))
atgggatggagctgtatcatcctcttcttggtagcaacagctacaggtgtacactccgagctcgtcatgacccagtctccatcttatcttgctgcatctcctggagaaaccattactattaattgcagggcaagtaagagcattagcaaatatttagcctggtatcaagagaaacctgggaaaactaataagcttcttatctactctggatccactttgcaatctggaattccatcaaggttcagtggcagtggatctggtacagatttcactctcaccatcagtagcctggagcctgaagattttgcaatgtattactgtcaacagcataatgaatatccgtacacgttcggaggggggaccaagcttgagatcaaaggtggtggtggttctggcggcggcggctccggtggtggtggttctgaggtgcagctgctcgagcagtctggagctgagctggtgaaacctggggcctcagtgaagatatcctgcaaggcttctggatacgccttcactaactactggctaggttgggtaaagcagaggcctggacatggacttgagtggattggagatcttttccctggaagtggtaatactcactacaatgagaggttcaggggcaaagccacactgactgcagacaaatcctcgagcacagcctttatgcagctcagtagcctgacatctgaggactctgctgtctatttctgtgcaagattgaggaactgggacgaggctatggactactggggccaagggaccacggtcaccgtctcctccggaggtggtggctccgacgtccaactggtgcagtcaggggctgaagtgaaaaaacctggggcctcagtgaaggtgtcctgcaaggcttctggctacacctttactaggtacacgatgcactgggtaaggcaggcacctggacagggtctggaatggattggatacattaatcctagccgtggttatactaattacgcagacagcgtcaagggccgcttcacaatcactacagacaaatccaccagcacagcctacatggaactgagcagcctgcgttctgaggacactgcaacctattactgtgcaagatattatgatgatcattactgccttgactactggggccaaggcaccacggtcaccgtctcctcaggcgaaggtactagtactggttctggaggttcaggtggagcagacgacattgtactgacccagtctccagcaactctgtctctgtctccaggggagcgtgccaccctgagctgcagagccagtcaaagtgtaagttacatgaactggtaccagcagaagccgggcaaggcacccaaaagatggatttatgacacatccaaagtggcttctggagtccctgctcgcttcagtggcagtgggtctgggaccgactactctctcacaatcaacagcttggaggctgaagatgctgccacttattactgccaacagtggagtagtaacccgctcacgttcggtggcgggaccaaggtggagatcaaa

SEQ ID NO: 49 - protein, 506 aa, artificial sequence
  3-1(VL-VH)xanti-CD3(VH(5)-VL(2))
MGWSCIILFLVATATGVHSELVMTQSPSYLAASPGETITINCRASKSISKYLAWYQEKPGKTNKLLIYSGSTLQSGIPSRFSGSGSGTDFTLTISSLEPEDFAMYYCQQHNEYPYTFGGGTKLEIKGGGGSGGGGSGGGGSEVQLLEQSGAELVKPGASVKISCKASGYAFTNYWLGWVKQRPGHGLEWIGDLFPGSGNTHYNERFRGKATLTADKSSSTAFMQLSSLTSEDSAVYFCARLRNWDEAMDYWGQGTTVTVSSGGGGSDVQLVQSGAEVKKPGASVKVSCKASGYTFTRYTMHWVRQAPGQGLEWIGYINPSRGYTNYADSVKGRFTITTDKSTSTAYMELSSLRSEDTATYYCARYYDDHYCLDYWGQGTTVTVSSGEGTSTGSGGSGGADDIVLTQSPATLSLSPGERATLSCRASQSVSYMNWYQQKPGKAPKRWIYDTSKVASGVPARFSGSGSGTDYSLTINSLEAEDAATYYCQQWSSNPLTFGGGTKVEIK

SEQ ID NO: 50 - DNA, 60 bp, artificial sequence
  Me83
ggttctggcggcggcggctccggtggtggtggttctgaggtgcagctgctcgacagtctg

SEQ ID NO: 51 - DNA, 41 bp, artificial sequence
  Me84
gtgctccggaggagacggtgaccgtggtcccttggccccag

SEQ ID NO: 52 - DNA, 53 bp, artificial sequence
  Me90
ccggagccgccgccgccagaaccaccaccacctttgatctcaagcttggtccc

SEQ ID NO: 53 - DNA, 52 bp, artificial sequence
  Me91a
ggattgtacactccgagctcgtcatgacccagtctccatcttatcttgctgc

SEQ ID NO: 54 - DNA, 1560 bp, artificial sequence
  3-5(VL-VH)xanti-CD3 (VH(5)-VL(2))
atgggatggagctgtatcatcctcttcttggtagcaacagctacaggtgtacactccgcgcgcgagctcgtgatgacccagactccactctccctgcctgtcagtcttggagatcaagcctccatctcttgcagatctagtcagagccttgtacacagtaatggaaacacctatttacattggtacctgcagaagccaggccagtctccaaagctcctgatctacaaagtttccaaccgattttctggggtcccagacaggttcagtggcagtggatcagggacagatttcacactcaagatcagcagagtggaggctgaggatctgggagtttatttctgctctcaaagtacacatgttccgtacacgttcggaggggggaccaagcttgagatcaaaggtggtggtggttctggcggcggcggctccggtggtggtggttctgaggtgcagctgctcgagcagtctggagctgagctggtaaggcctgggacttcagtgaagctgtcctgcaaggcttctggctacaccttcacaagctatggtttaagctgggtgaagcagagaactggacagggccttgagtggattggagaggtttatcctagaattggtaatgcttactacaatgagaagttcaagggcaaggccacactgactgcagacaaatcctccagcacagcgtccatggagctccgcagcctgacatctgaggactctgcggtctatttctgtgcaagacggggatcctacggtagtaactacgactggtacttcgatgtctggggccaagggaccacggtcaccgtctcctccggaggtggtggctccgacgtccaactggtgcagtcaggggctgaagtgaaaaaacctggggcctcagtgaaggtgtcctgcaaggcttctggctacacctttactaggtacacgatgcactgggtaaggcaggcacctggacagggtctggaatggattggatacattaatcctagccgtggttatactaattacgcagacagcgtcaagggccgcttcacaatcactacagacaaatccaccagcacagcctacatggaactgagcagcctgcgttctgaggacactgcaacctattactgtgcaagatattatgatgatcattactgccttgactactggggccaaggcaccacggtcaccgtctcctcaggcgaaggtactagtactggttctggtggaagtggaggttcaggtggagcagacgacattgtactgacccagtctccagcaactctgtctctgtctccaggggagcgtgccaccctgagctgcagagccagtcaaagtgtaagttacatgaactggtaccagcagaagccgggcaaggcacccaaaagatggatttatgacacatccaaagtggcttctggagtccctgctcgcttcagtggcagtgggtctgggaccgactactctctcacaatcaacagcttggaggctgaagatgctgccacttattactgccaacagtggagtagtaacccgctcacgttcggtggcgggaccaaggtggagatcaaa

SEQ ID NO: 55 - protein, 520 aa, artificial sequence
  3-5(VL-VH)xanti-CD3 (VH(5)-VL(2))
MGWSCIILFLVATATGVHSARELVMTQTPLSLPVSLGDQASISCRSSQSLVHSNGNTYLHWYLQKPGQSPKLLIYKVSNRFSGVPDRFSGSGSGTDFTLKISRVEAEDLGVYFCSQSTHVPYTFGGGTKLEIKGGGGSGGGGSGGGGSEVQLLEQSGAELVRPGTSVKLSCKASGYTFTSYGLSWVKQRTGQGLEWIGEVYPRIGNAYYNEKFKGKATLTADKSSSTASMELRSLTSEDSAVYFCARRGSYGSNYDWYFDVWGQGTTVTVSSGGGGSDVQLVQSGAEVKKPGASVKVSCKASGYTFTRYTMHWVRQAPGQGLEWIGYINPSRGYTNYADSVKGRFTITTDKSTSTAYMELSSLRSEDTATYYCARYYDDHYCLDYWGQGTTVTVSSGEGTSTGSGGSGGSGGADDIVLTQSPATLSLSPGERATLSCRASQSVSYMNWYQQKPGKAPKRWIYDTSKVASGVPARFSGSGSGTDYSLTINSLEAEDAATYYCQQWSSNPLTFGGGTKVEIK

SEQ ID NO: 56 - DNA, 40 bp, artificial sequence
  Me81
ggatgcgcgcgagctcgtgatgacccagactccactctcc

SEQ ID NO: 57 - DNA, 1545 bp, artificial sequence
  4-1(VL-VH)xanti-CD3(VH(5)-VL(2))
atgggatggagctgtatcatcctcttcttggtagcaacagctacaggtgtacactccgagctcgtgatgacacagtctccatcctccctgagtgtgtcagcaggagagaaggtcactatgagctgcaagtccagtcagagtctgttaaacagtggaaatcaaaagaactacttggcctggtaccagcagaaaccagggcagcctcctaaactgttgatctacggggcatccactagggaatctggggtccctgatcgcttcacaggcagtggatctggaacagatttcactctcaccatcagcagtgtgcaggctgaagacctggcagtttattactgtcagaatgattatagttatccgtacacgttcggaggggggaccaagcttgagatcaaaggtggtggtggttctggcggcggcggctccggtggtggtggttctgaggtgcagctgctcgagcagtctggagctgagctggtaaggcctgggacttcagtgaagatatcctgcaaggcttctggatacgccttcactaactactggctaggttgggttaagcagaggcctggacatggacttgaatgggttggagatattttccctggaagtggtaatgctcactacaatgagaagttcaagggcaaagccacactgactgcagacaagtcctcgtacacagcctatatgcagctcagtagcctgacatctgaggactctgctgtctatttctgtgcaagattgcggaactgggacgaggctatggactactggggccaagggaccacggtcaccgtctcctccggaggtggtggctccgacgtccaactggtgcagtcaggggctgaagtgaaaaaacctggggcctcagtgaaggtgtcctgcaaggcttctggctacacctttactaggtacacgatgcactgggtaaggcaggcacctggacagggtctggaatggattggatacattaatcctagccgtggttatactaattacgcagacagcgtcaagggccgcttcacaatcactacagacaaatccaccagcacagcctacatggaactgagcagcctgcgttctgaggacactgcaacctattactgtgcaagatattatgatgatcattactgccttgactactggggccaaggcaccacggtcaccgtctcctcaggcgaaggtactagtactggttctggtggaagtggaggttcaggtggagcagacgacattgtactgacccagtctccagcaactctgtctctgtctccaggggagcgtgccaccctgagctgcagagccagtcaaagtgtaagttacatgaactggtaccagcagaagccgggcaaggcacccaaaagatggatttatgacacatccaaagtggcttctggagtccctgctcgcttcagtggcagtgggtctgggaccgactactctctcacaatcaacagcttggaggctgaagatgctgccacttattactgccaacagtggagtagtaacccgctcacgttcggtggcgggaccaaggtggagatcaaa

SEQ ID NO: 58 - protein, 515 aa, artificial sequence
  4-1(VL-VH)xanti-CD3(VH(5)-VL(2))
MGWSCIILFLVATATGVHSELVMTQSPSSLSVSAGEKVTMSCKSSQSLLNSGNQKNYLAWYQQKPGQPPKLLIYGASTRESGVPDRFTGSGSGTDFTLTISSVQAEDLAVYYCQNDYSYPYTFGGGTKLEIKGGGGSGGGGSGGGGSEVQLLEQSGAELVRPGTSVKISCKASGYAFTNYWLGWVKQRPGHGLEWVGDIFPGSGNAHYNEKFKGKATLTADKSSYTAYMQLSSLTSEDSAVYFCARLRNWDEAMDYWGQGTTVTVSSGGGGSDVQLVQSGAEVKKPGASVKVSCKASGYTFTRYTMHWVRQAPGQGLEWIGYINPSRGYTNYADSVKGRFTITTDKSTSTAYMELSSLRSEDTATYYCARYYDDHYCLDYWGQGTTVTVSSGEGTSTGSGGSGGSGGADDIVLTQSPATLSLSPGERATLSCRASQSVSYMNWYQQKPGKAPKRWIYDTSKVASGVPARFSGSGSGTDYSLTINSLEAEDAATYYCQQWSSNPLTFGGGTKVEIK

SEQ ID NO: 59 - DNA, 44 bp, artificial sequence
  Me92a
ggattgtacactccgagctcgtgatgacacagtctccatcctcc

SEQ ID NO: 60 - DNA, 1560 bp, artificial sequence
  4-7(VL-VH)xanti-CD3(VH(5)-VL(2))
atgggatggagctgtatcatcctcttcttggtagcaacagctacaggtgtacactccgcgcgcgagctcgtgatgacccagactccactctccctgcctgtcagtcttggagatcaagcctccatctcttgcagatctagtcagagccttgtacacagtaatggaaacacctatttacattggtacctgcagaagccaggccagtctccaaagctcctgatctacaaagtttccaaccgattttctggggtcccagacaggttcagtggcagtggatcagggacagatttcacactcaagatcagcagagtggaggctgaggatctgggagtttatttctgctctcaaagtacacatgttccgtacacgttcggaggggggaccaagcttgagatcaaaggtggtggtggttctggcggcggcggctccggtggtggtggttctgaggtgcagctgctcgagcagtctggagctgagctggcgaggcctggggcttcagtgaagctgtcctgcaaggcttctggctacaccttcacaaactatggtttaagctgggtgaagcagaggcctggacaggtccttgagtggattggagaggtttatcctagaattggtaatgcttactacaatgagaagttcaagggcaaggccacactgactgcagacaaatcctccagcacagcgtccatggagctccgcagcctgacctctgaggactctgcggtctatttctgtgcaagacggggatcctacgatactaactacgactggtacttcgatgtctggggccaagggaccacggtcaccgtctcctccggaggtggtggctccgacgtccaactggtgcagtcaggggctgaagtgaaaaaacctggggcctcagtgaaggtgtcctgcaaggcttctggctacacctttactaggtacacgatgcactgggtaaggcaggcacctggacagggtctggaatggattggatacattaatcctagccgtggttatactaattacgcagacagcgtcaagggccgcttcacaatcactacagacaaatccaccagcacagcctacatggaactgagcagcctgcgttctgaggacactgcaacctattactgtgcaagatattatgatgatcattactgccttgactactggggccaaggcaccacggtcaccgtctcctcaggcgaaggtactagtactggttctggtggaagtggaggttcaggtggagcagacgacattgtactgacccagtctccagcaactctgtctctgtctccaggggagcgtgccaccctgagctgcagagccagtcaaagtgtaagttacatgaactggtaccagcagaagccgggcaaggcacccaaaagatggatttatgacacatccaaagtggcttctggagtccctgctcgcttcagtggcagtgggtctgggaccgactactctctcacaatcaacagcttggaggctgaagatgctgccacttattactgccaacagtggagtagtaacccgctcacgttcggtggcgggaccaaggtggagatcaaa

SEQ ID NO: 61 - protein, 520 aa, artificial sequence
  4-7(VL-VH)xanti-CD3(VH(5)-VL(2))
MGWSCIILFLVATATGVHSARELVMTQTPLSLPVSLGDQASISCRSSQSLVHSNGNTYLHWYLQKPGQSPKLLIYKVSNRFSGVPDRFSGSGSGTDFTLKISRVEAEDLGVYFCSQSTHVPYTFGGGTKLEIKGGGGSGGGGSGGGGSEVQLLEQSGAELARPGASVKLSCKASGYTFTNYGLSWVKQRPGQVLEWIGEVYPRIGNAYYNEKFKGKATLTADKSSSTASMELRSLTSEDSAVYFCARRGSYDTNYDWYFDVWGQGTTVTVSSGGGGSDVQLVQSGAEVKKPGASVKVSCKASGYTFTRYTMHWVRQAPGQGLEWIGYINPSRGYTNYADSVKGRFTITTDKSTSTAYMELSSLRSEDTATYYCARYYDDHYCLDYWGQGTTVTVSSGEGTSTGSGGSGGSGGADDIVLTQSPATLSLSPGERATLSCRASQSVSYMNWYQQKPGKAPKRWIYDTSKVASGVPARFSGSGSGTDYSLTINSLEAEDAATYYCQQWSSNPLTFGGGTKVEIK

SEQ ID NO: 62 - DNA, 1545 bp, artificial sequence
  5-10(VL-VH)xanti-CD3(VH(5)-VL(2))
atgggatggagctgtatcatcctcttcttggtagcaacagctacaggtgtacactccgagctcgtgatgacacagtctccatcctccctgactgtgacagcaggagagaaggtcactatgagctgcaagtccagtcagagtctgttaaacagtggaaatcaaaagaactacttgacctggtaccagcagaaaccagggcagcctcctaaactgttgatctactgggcatccactagggaatctggggtccctgatcgcttcacaggcagtggatctggaacagatttcactctcaccatcagcagtgtgcaggctgaagacctggcagtttattactgtcagaatgattatagttatccgctcacgttcggtgctgggaccaagcttgagatcaaaggtggtggtggttctggcggcggcggctccggtggtggtggttctgaggtgcagctgctcgagcagtctggagctgagctggtaaggcctgggacttcagtgaagatatcctgcaaggcttctggatacgccttcactaactactggctaggttgggtaaagcagaggcctggacatggacttgagtggattggagatattttccctggaagtggtaatatccactacaatgagaagttcaagggcaaagccacactgactgcagacaaatcttcgagcacagcctatatgcagctcagtagcctgacatttgaggactctgctgtctatttctgtgcaagactgaggaactgggacgagcctatggactactggggccaagggaccacggtcaccgtctcctccggaggtggtggctccgacgtccaactggtgcagtcaggggctgaagtgaaaaaacctggggcctcagtgaaggtgtcctgcaaggcttctggctacacctttactaggtacacgatgcactgggtaaggcaggcacctggacagggtctggaatggattggatacattaatcctagccgtggttatactaattacgcagacagcgtcaagggccgcttcacaatcactacagacaaatccaccagcacagcctacatggaactgagcagcctgcgttctgaggacactgcaacctattactgtgcaagatattatgatgatcattactgccttgactactggggccaaggcaccacggtcaccgtctcctcaggcgaaggtactagtactggttctggtggaagtggaggttcaggtggagcagacgacattgtactgacccagtctccagcaactctgtctctgtctccaggggagcgtgccaccctgagctgcagagccagtcaaagtgtaagttacatgaactggtaccagcagaagccgggcaaggcacccaaaagatggatttatgacacatccaaagtggcttctggagtccctgctcgcttcagtggcagtgggtctgggaccgactactctctcacaatcaacagcttggaggctgaagatgctgccacttattactgccaacagtggagtagtaacccgctcacgttcggtggcgggaccaaggtggagatcaaa

SEQ ID NO: 63 - protein, 515 aa, artificial sequence
  5-10(VL-VH)xanti-CD3(VH(5)-VL(2))
MGWSCIILFLVATATGVHSELVMTQSPSSLTVTAGEKVTMSCKSSQSLLNSGNQKNYLTWYQQKPGQPPKLLIYWASTRESGVPDRFTGSGSGTDFTLTISSVQAEDLAVYYCQNDYSYPLTFGAGTKLEIKGGGGSGGGGSGGGGSEVQLLEQSGAELVRPGTSVKISCKASGYAFTNYWLGWVKQRPGHGLEWIGDIFPGSGNIHYNEKFKGKATLTADKSSSTAYMQLSSLTFEDSAVYFCARLRNWDEPMDYWGQGTTVTVSSGGGGSDVQLVQSGAEVKKPGASVKVSCKASGYTFTRYTMHWVRQAPGQGLEWIGYINPSRGYTNYADSVKGRFTITTDKSTSTAYMELSSLRSEDTATYYCARYYDDHYCLDYWGQGTTVTVSSGEGTSTGSGGSGGSGGADDIVLTQSPATLSLSPGERATLSCRASQSVSYMNWYQQKPGKAPKRWIYDTSKVASGVPARFSGSGSGTDYSLTINSLEAEDAATYYCQQWSSNPLTFGGGTKVEIK

SEQ ID NO: 64 - DNA, 1500 bp, artificial sequence
  VH5/VL2x3-5
gacgtccaactggtgcagtcaggggctgaagtgaaaaaacctggggcctcagtgaaggtgtcctgcaaggcttctggctacacctttactaggtacacgatgcactgggtaaggcaggcacctggacagggtctggaatggattggatacattaatcctagccgtggttatactaattacgcagacagcgtcaagggccgcttcacaatcactacagacaaatccaccagcacagcctacatggaactgagcagcctgcgttctgaggacactgcaacctattactgtgcaagatattatgatgatcattactgccttgactactggggccaaggcaccacggtcaccgtctcctcaggcgaaggtactagtactggttctggtggaagtggaggttcaggtggagcagacgacattgtactgacccagtctccagcaactctgtctctgtctccaggggagcgtgccaccctgagctgcagagccagtcaaagtgtaagttacatgaactggtaccagcagaagccgggcaaggcacccaaaagatggatttatgacacatccaaagtggcttctggagtccctgctcgcttcagtggcagtgggtctgggaccgactactctctcacaatcaacagcttggaggctgaagatgctgccacttattactgccaacagtggagtagtaacccgctcacgttcggtggcgggaccaaggtggagatcaaatccggaggtggtggatccgaggtgcagctgctcgagcagtctggagctgagctggtaaggcctgggacttcagtgaagctgtcctgcaaggcttctggctacaccttcacaagctatggtttaagctgggtgaagcagagaactggacagggccttgagtggattggagaggtttatcctagaattggtaatgcttactacaatgagaagttcaagggcaaggccacactgactgcagacaaatcctccagcacagcgtccatggagctccgcagcctgacatctgaggactctgcggtctatttctgtgcaagacggggatcctacggtagtaactacgactggtacttcgatgtctggggccaagggaccacggtcaccgtctcctcaggtggtggtggttctggcggcggcggctccggtggtggtggttctgagctcgtgatgacccagactccactctccctgcctgtcagtcttggagatcaagcctccatctcttgcagatctagtcagagccttgtacacagtaatggaaacacctatttacattggtacctgcagaagccaggccagtctccaaagctcctgatctacaaagtttccaaccgattttctggggtcccagacaggttcagtggcagtggatcagggacagatttcacactcaagatcagcagagtggaggctgaggatctgggagtttatttctgctctcaaagtacacatgttccgtacacgttcggaggggggaccaagcttgagatcaaa

SEQ ID NO: 65 - protein, 500 aa, artificial sequence
  VH5/VL2x3-5
DVQLVQSGAEVKKPGASVKVSCKASGYTFTRYTMHWVRQAPGQGLEWIGYINPSRGYTNYADSVKGRFTITTDKSTSTAYMELSSLRSEDTATYYCARYYDDHYCLDYWGQGTTVTVSSGEGTSTGSGGSGGSGGADDIVLTQSPATLSLSPGERATLSCRASQSVSYMNWYQQKPGKAPKRWIYDTSKVASGVPARFSGSGSGTDYSLTINSLEAEDAATYYCQQWSSNPLTFGGGTKVEIKSGGGGSEVQLLEQSGAELVRPGTSVKLSCKASGYTFTSYGLSWVKQRTGQGLEWIGEVYPRIGNAYYNEKFKGKATLTADKSSSTASMELRSLTSEDSAVYFCARRGSYGSNYDWYFDVWGQGTTVTVSSGGGGSGGGGSGGGGSELVMTQTPLSLPVSLGDQASISCRSSQSLVHSNGNTYLHWYLQKPGQSPKLLIYKVSNRFSGVPDRFSGSGSGTDFTLKISRVEAEDLGVYFCSQSTHVPYTFGGGTKLEIK

SEQ ID NO: 66 - DNA, 1491 bp, artificial sequence
  VH5/VL2x4-1
gacgtccaactggtgcagtcaggggctgaagtgaaaaaacctggggcctcagtgaaggtgtcctgcaaggcttctggctacacctttactaggtacacgatgcactgggtaaggcaggcacctggacagggtctggaatggattggatacattaatcctagccgtggttatactaattacgcagacagcgtcaagggccgcttcacaatcactacagacaaatccaccagcacagcctacatggaactgagcagcctgcgttctgaggacactgcaacctattactgtgcaagatattatgatgatcattactgccttgactactggggccaaggcaccacggtcaccgtctcctcaggcgaaggtactagtactggttctggtggaagtggaggttcaggtggagcagacgacattgtactgacccagtctccagcaactctgtctctgtctccaggggagcgtgccaccctgagctgcagagccagtcaaagtgtaagttacatgaactggtaccagcagaagccgggcaaggcacccaaaagatggatttatgacacatccaaagtggcttctggagtccctgctcgcttcagtggcagtgggtctgggaccgactactctctcacaatcaacagcttggaggctgaagatgctgccacttattactgccaacagtggagtagtaacccgctcacgttcggtggcgggaccaaggtggagatcaaatccggaggtggtggatccgaggtgcagctgctcgagcagtctggagctgagctggtaaggcctgggacttcagtgaagatatcctgcaaggcttctggatacgccttcactaactactggctaggttgggttaagcagaggcctggacatggacttgaatgggttggagatattttccctggaagtggtaatgctcactacaatgagaagttcaagggcaaagccacactgactgcagacaagtcctcgtacacagcctatatgcagctcagtagcctgacatctgaggactctgctgtctatttctgtgcaagattgcggaactgggacgaggctatggactactggggccaagggaccacggtcaccgtctcctcaggtggtggtggttctggcggcggcggctccggtggtggtggttctgagctcgtgatgacacagtctccatcctccctgagtgtgtcagcaggagagaaggtcactatgagctgcaagtccagtcagagtctgttaaacagtggaaatcaaaagaactacttggcctggtaccagcagaaaccagggcagcctcctaaactgttgatctacggggcatccactagggaatctggggtccctgatcgcttcacaggcagtggatctggaacagatttcactctcaccatcagcagtgtgcaggctgaagacctggcagtttattactgtcagaatgattatagttatccgtacacgttcggaggggggaccaagcttgagatcaaa

SEQ ID NO: 67 - protein, 497 aa, artificial sequence
  VH5/VL2x4-1
DVQLVQSGAEVKKPGASVKVSCKASGYTFTRYTMHWVRQAPGQGLEWIGYINPSRGYTNYADSVKGRFTITTDKSTSTAYMELSSLRSEDTATYYCARYYDDHYCLDYWGQGTTVTVSSGEGTSTGSGGSGGSGGADDIVLTQSPATLSLSPGERATLSCRASQSVSYMNWYQQKPGKAPKRWIYDTSKVASGVPARFSGSGSGTDYSLTINSLEAEDAATYYCQQWSSNPLTFGGGTKVEIKSGGGGSEVQLLEQSGAELVRPGTSVKISCKASGYAFTNYWLGWVKQRPGHGLEWVGDIFPGSGNAHYNEKFKGKATLTADKSSYTAYMQLSSLTSEDSAVYFCARLRNWDEAMDYWGQGTTVTVSSGGGGSGGGGSGGGGSELVMTQSPSSLSVSAGEKVTMSCKSSQSLLNSGNQKNYLAWYQQKPGQPPKLLIYGASTRESGVPDRFTGSGSGTDFTLTISSVQAEDLAVYYCQNDYSYPYTFGGGTKLEIK

SEQ ID NO: 68 - protein, 18 aa, artificial sequence
  non-deimmunized linker sequence
VEGGSGGSGGSGGSGGVD

SEQ ID NO: 69 - DNA, 357 bp, artificial sequence
  anti-CD3 VH2
gacgtccaactggtgcagtcaggggctgaagtgaaaaaacctggggcctcagtgaaggtgtcctgcaaggcttctggctacaccgctactaggtacacgatgcactgggtaaggcaggcacctggacagggtctggaatggattggatacattaatcctagccgtggttatactaattacgcacagaagttgcagggccgcgtcacaatgactacagacacttccaccagcacagcctacatggaactgagcagcctgcgttctgaggacactgcaacctattactgtgcaagatattatgatgatcattactgccttgactactggggccaaggcaccacggtcaccgtctcctca

SEQ ID NO: 70 - protein, 119 aa, artificial sequence
  anti-CD3 VH2
DVQLVQSGAEVKKPGASVKVSCKASGYTATRYTMHWVRQAPGQGLEWIGYINPSRGYTNYAQKLQGRVTMTTDTSTSTAYMELSSLRSEDTATYYCARYYDDHYCLDYWGQGTTVTVSS

SEQ ID NO: 71 - DNA, 357 bp, artificial sequence
  anti-CD3 VH3
gacgtccaactggtgcagtcaggggctgaagtgaaaaaacctggggcctcagtgaaggtgtcctgcaaggcttctggctacaccgctactaggtacacgatgcactgggtaaggcaggcacctggacagggtctggaatggattggatacattaatcctagccgtggttatactaattacgcacagaagttgcagggccgcgtcacaatgactacagacacttccaccagcacagcctacctgcaaatgaacagcctgaaaactgaggacactgcagtctattactgtgcaagatattatgatgatcattactgccttgactactggggccaaggcaccacggtcaccgtctcctca

SEQ ID NO: 72 - protein, 119 aa, artificial sequence
  anti-CD3 VH3
DVQLVQSGAEVKKPGASVKVSCKASGYTATRYTMHWVRQAPGQGLEWIGYINPSRGYTNYAQKLQGRVTMTTDTSTSTAYLQMNSLKTEDTAVYYCARYYDDHYCLDYWGQGTTVTVSS

SEQ ID NO: 73 - DNA, 357 bp, artificial sequence
  anti-CD3 VH5
gacgtccaactggtgcagtcaggggctgaagtgaaaaaacctggggcctcagtgaaggtgtcctgcaaggcttctggctacacctttactaggtacacgatgcactgggtaaggcaggcacctggacagggtctggaatggattggatacattaatcctagccgtggttatactaattacgcagacagcgtcaagggccgcttcacaatcactacagacaaatccaccagcacagcctacatggaactgagcagcctgcgttctgaggacactgcaacctattactgtgcaagatattatgatgatcattactgccttgactactggggccaaggcaccacggtcaccgtctcctca

SEQ ID NO: 74 - protein, 119 aa, artificial sequence
  anti-CD3 VH5
DVQLVQSGAEVKKPGASVKVSCKASGYTFTRYTMHWVRQAPGQGLEWIGYINPSRGYTNYADSVKGRFTITTDKSTSTAYMELSSLRSEDTATYYCARYYDDHYCLDYWGQGTTVTVSS

SEQ ID NO: 75 - DNA, 357 bp, artificial sequence
  anti-CD3 VH7
gacgtccaactggtgcagtcaggggctgaagtgaaaaaacctggggcctcagtgaaggtgtcctgcaaggcttctggctacacctttactaggtacacgatgcactgggtaaggcaggcacctggacagggtctggaatggattggatacattaatcctagccgtggttatactaattacaatcagaagttcaaggaccgcgtcacaatcactacagacaaatccaccagcacagcctacatggaactgagcagcctgcgttctgaggacactgcagtctattactgtgcaagatattatgatgatcattactgccttgactactggggccaaggcaccacggtcaccgtctcctca

SEQ ID NO: 76 - protein, 119 aa, artificial sequence
  anti-CD3 VH7
DVQLVQSGAEVKKPGASVKVSCKASGYTFTRYTMHWVRQAPGQGLEWIGYINPSRGYTNYNQKFKDRVTITTDKSTSTAYMELSSLRSEDTAVYYCARYYDDHYCLDYWGQGTTVTVSS

SEQ ID NO: 77 - DNA, 318 bp, artificial sequence
  anti-CD3 VL1
gacattcagatgacccagtctccatctagcctgtctgcatctgtcggggaccgtgtcaccatcacctgcagagccagtcaaagtgtaagttacatgaactggtaccagcagaagccgggcaaggcacccaaaagatggatttatgacacatccaaagtggcttctggagtccctgctcgcttcagtggcagtgggtctgggaccgactactctctcacaatcaacagcttggaggctgaagatgctgccacttattactgccaacagtggagtagtaacccgctcacgttcggtggcgggaccaaggtggagatcaaa

SEQ ID NO: 78 - protein, 106 aa, artificial sequence
  anti-CD3 VL1
DIQMTQSPSSLSASVGDRVTITCRASQSVSYMNWYQQKPGKAPKRWIYDTSKVASGVPARFSGSGSGTDYSLTINSLEAEDAATYYCQQWSSNPLTFGGGTKVEIK

SEQ ID NO: 79 - DNA, 318 bp, artificial sequence
  anti-CD3 VL2
gacattgtactgacccagtctccagcaactctgtctctgtctccaggggagcgtgccaccctgagctgcagagccagtcaaagtgtaagttacatgaactggtaccagcagaagccgggcaaggcacccaaaagatggatttatgacacatccaaagtggcttctggagtccctgctcgcttcagtggcagtgggtctgggaccgactactctctcacaatcaacagcttggaggctgaagatgctgccacttattactgccaacagtggagtagtaacccgctcacgttcggtggcgggaccaaggtggagatcaaa

SEQ ID NO: 80 - protein, 106 aa, artificial sequence
  anti-CD3 VL2
DIVLTQSPATLSLSPGERATLSCRASQSVSYMNWYQQKPGKAPKRWIYDTSKVASGVPARFSGSGSGTDYSLTINSLEAEDAATYYCQQWSSNPLTFGGGTKVEIK

SEQ ID NO: 81 - DNA, 318 bp, artificial sequence
  anti-CD3 VL3
gacattgtactgacccagtctccagcaactctgtctctgtctccaggggagcgtgccaccctgacctgcagagccagttcaagtgtaagttacatgaactggtaccagcagaagccgggcaaggcacccaaaagatggatttatgacacatccaaagtggcttctggagtccctgctcgcttcagtggcagtgggtctgggaccgactactctctcacaatcaacagcttggaggctgaagatgctgccacttattactgccaacagtggagtagtaacccgctcacgttcggtggcgggaccaaggtggagatcaaa

SEQ ID NO: 82 - protein, 106 aa, artificial sequence
  anti-CD3 VL3
DIVLTQSPATLSLSPGERATLTCRASSSVSYMNWYQQKPGKAPKRWIYDTSKVASGVPARFSGSGSGTDYSLTINSLEAEDAATYYCQQWSSNPLTFGGGTKVEIK

SEQ ID NO: 83 - DNA, 30 bp, artificial sequence
  vH CDR1 anti-CD3 wt
ggctacacctttactaggtacacgatgcac

SEQ ID NO: 84 - protein, 10 aa, artificial sequence
  vH CDR1 anti-CD3 wt
GYTFTRYTMH

SEQ ID NO: 85 - DNA, 30 bp, artificial sequence
  vH CDR1 VH2,3
ggctacaccgctactaggtacacgatgcac

SEQ ID NO: 86 - protein, 10 aa, artificial sequence
  vH CDR1 VH2,3
GYTATRYTMH

SEQ ID NO: 87 - DNA, 30 bp, artificial sequence; identical to SEQ ID NO: 83
  vH CDR1 VH5,7

SEQ ID NO: 88 - protein, 10 aa, artificial sequence
  vH CDR1 VH5,7
GYTFTRYTMH

SEQ ID NO: 89 - DNA, 51 bp, artificial sequence
  vH CDR2 wt anti-CD3 VH7
tacattaatcctagccgtggttatactaattacaatcagaagttcaaggac

SEQ ID NO: 90 - protein, 17 aa, artificial sequence
  vH CDR2 wt anti-CD3 VH7
YINPSRGYTNYNQKFKD

SEQ ID NO: 91 - DNA, 51 bp, artificial sequence
  vH CDR2 VH5
tacattaatcctagccgtggttatactaattacgcagacagcgtcaagggc

SEQ ID NO: 92 - protein, 17 aa, artificial sequence
  vH CDR2 VH5
YINPSRGYTNYADSVKG

SEQ ID NO: 93 - DNA, 51 bp, artificial sequence
  vH CDR2 VH2,3
tacattaatcctagccgtggttatactaattacgcacagaagttgcagggc

SEQ ID NO: 94 - protein, 17 aa, artificial sequence
  vH CDR2 VH2,3
YINPSRGYTNYAQKLQG

SEQ ID NO: 95 - DNA, 30 bp, artificial sequence
  vH CDR3 wt anti-CD3 VH2,3,5,7
tattatgatgatcattactgccttgactac

SEQ ID NO: 96 - protein, 10 aa, artificial sequence
  vH CDR3 wt anti-CD3 VH2,3,5,7
YYDDHYCLDY

SEQ ID NO: 97 - DNA, 30 bp, artificial sequence
  vK CDR1 wt anti-CD3 VL3
agagccagttcaagtgtaagttacatgaac

SEQ ID NO: 98 - protein, 10 aa, artificial sequence
  vK CDR1 wt anti-CD3 VL3
RASSSVSYMN

SEQ ID NO: 99 - DNA, 30 bp, artificial sequence
  vK CDR1 VL 1,2
agagccagtcaaagtgtaagttacatgaac

SEQ ID NO: 100 - protein, 10 aa, artificial sequence
  vK CDR1 VL 1,2
RASQSVSYMN

SEQ ID NO: 101 - DNA, 21 bp, artificial sequence
  vK CDR2 wt anti-CD3 VL1-3
gacacatccaaagtggcttct

SEQ ID NO: 102 - protein, 7 aa, artificial sequence
  vK CDR2 wt anti-CD3 VL1-3
DTSKVAS

SEQ ID NO: 103 - DNA, 27 bp, artificial sequence
  vK CDR3 wt anti-CD3 VL1-3
caacagtggagtagtaacccgctcacg

SEQ ID NO: 104 - protein, 9 aa, artificial sequence
  vK CDR3 wt anti-CD3 VL1-3
QQWSSNPLT

SEQ ID NO: 105 - DNA, 357 bp, artificial sequence
  vH anti-CD3 with the mutations of cys->ser
gatatcaaactgcagcagtcaggggctgaactggcaagacctggggcctcagtgaagatgtcctgcaagacttctggctacacctttactaggtacacgatgcactgggtaaaacagaggcctggacagggtctggaatggattggatacattaatcctagccgtggttatactaattacaatcagaagttcaaggacaaggccacattgactacagacaaatcctccagcacagcctacatgcaactgagcagcctgacatctgaggactctgcagtctattactgtgcaagatattatgatgatcattactcccttgactactggggccaaggcaccactctcacagtctcctca

SEQ ID NO: 106 - protein, 119 aa, artificial sequence
  vH anti-CD3 with the mutations of cys ->ser
DIKLQQSGAELARPGASVKMSCKTSGYTFTRYTMHWVKQRPGQGLEWIGYINPSRGYTNYNQKFKDKATLTTDKSSSTAYMQLSSLTSEDSAVYYCARYYDDHYSLDYWGQGTTLTVSS

SEQ ID NO: 107 - DNA, 30 bp, artificial sequence
  vH CDR3 anti-CD3 with the mutation cys-> ser
tattatgatgatcattactcccttgactac

SEQ ID NO: 108 - protein, 10 aa, artificial sequence
  vH CDR3 anti-CD3 with the mutation cys-> ser
YYDDHYSLDY

SEQ ID NO: 109 - DNA, 357 bp, artificial sequence
  wild type anti-CD3 VH
gatatcaaactgcagcagtcaggggctgaactggcaagacctggggcctcagtgaagatgtcctgcaagacttctggctacacctttactaggtacacgatgcactgggtaaaacagaggcctggacagggtctggaatggattggatacattaatcctagccgtggttatactaattacaatcagaagttcaaggacaaggccacattgactacagacaaatcctccagcacagcctacatgcaactgagcagcctgacatctgaggactctgcagtctattactgtgcaagatattatgatgatcattactgccttgactactggggccaaggcaccactctcacagtctcctca

SEQ ID NO: 110 - protein, 119 aa, artificial sequence
  wild type anti-CD3 VH
DIKLQQSGAELARPGASVKMSCKTSGYTFTRYTMHWVKQRPGQGLEWIGYINPSRGYTNYNQKFKDKATLTTDKSSSTAYMQLSSLTSEDSAVYYCARYYDDHYCLDYWGQGTTLTVSS

SEQ ID NO: 111 - DNA, 318 bp, artificial sequence
  wild type anti-CD3 VK
gacattcagctgacccagtctccagcaatcatgtctgcatctccaggggagaaggtcaccatgacctgcagagccagttcaagtgtaagttacatgaactggtaccagcagaagtcaggcacctcccccaaaagatggatttatgacacatccaaagtggcttctggagtcccttatcgcttcagtggcagtgggtctgggacctcatactctctcacaatcagcagcatggaggctgaagatgctgccacttattactgccaacagtggagtagtaacccgctcacgttcggtgctgggaccaagctggagctgaaa

SEQ ID NO: 112 - protein, 106 aa, artificial sequence
  wild type anti-CD3 VK
DIQLTQSPAIMSASPGEKVTMTCRASSSVSYMNWYQQKSGTSPKRWIYDTSKVASGVPYRFSGSGSGTSYSLTISSMEAEDAATYYCQQWSSNPLTFGAGTKLELK

SEQ ID NO: 113 - DNA, 372 bp, artificial sequence
  CD19 VH
caggtgcagctgcagcagtctggggctgagctggtgaggcctgggtcctcagtgaagatttcctgcaaggcttctggctatgcattcagtagctactggatgaactgggtgaagcagaggcctggacagggtcttgagtggattggacagatttggcctggagatggtgatactaactacaatggaaagttcaagggtaaagccactctgactgcagacgaatcctccagcacagcctacatgcaactcagcagcctagcatctgaggactctgcggtctatttctgtgcaagacgggagactacgacggtaggccgttattactatgctatggactactggggccaagggaccacggtcaccgtctcctcc

SEQ ID NO: 114 - protein, 124 aa, artificial sequence
  CD19 VH
QVQLQQSGAELVRPGSSVKISCKASGYAFSSYWMNWVKQRPGQGLEWIGQIWPGDGDTNYNGKFKGKATLTADESSSTAYMQLSSLASEDSAVYFCARRETTTVGRYYYAMDYWGQGTTVTVSS

SEQ ID NO: 115 - DNA, 333 bp, artificial sequence
  CD19 VL
gatatccagctgacccagtctccagcttctttggctgtgtctctagggcagagggccaccatctcctgcaaggccagccaaagtgttgattatgatggtgatagttatttgaactggtaccaacagattccaggacagccacccaaactcctcatctatgatgcatccaatctagtttctgggatcccacccaggtttagtggcagtgggtctgggacagacttcaccctcaacatccatcctgtggagaaggtggatgctgcaacctatcactgtcagcaaagtactgaggatccgtggacgttcggtggagggaccaagctcgagatcaaa

SEQ ID NO: 116 - protein, 111 aa, artificial sequence
  CD19 VL
DIQLTQSPASLAVSLGQRATISCKASQSVDYDGDSYLNWYQQIPGQPPKLLIYDASNLVSGIPPRFSGSGSGTDFTLNIHPVEKVDAATYHCQQSTEDPWTFGGGTKLEIK

SEQ ID NO: 117 - DNA, 47 bp, artificial sequence
  4-7 VL BspEI FOR
ctgaaatccggaggtggtggatccgagctcgtgatgacccagactcc

SEQ ID NO: 118 - DNA, 52 bp, artificial sequence
  4-7 VL GS15 REV
ggagccgccgccgccagaaccaccaccacctttgatctcaagcttggtcccc

SEQ ID NO: 119 - protein, 10 aa, artificial sequence
  CDRH3 M1 mutant
HYDDHYCLDY

SEQ ID NO: 120 - protein, 10 aa, artificial sequence
  CDRH3 M4 mutant
YSDDHYCLDY

SEQ ID NO: 121 - protein, 10 aa, artificial sequence
  CDRH3 M7 mutant
YYDAHYCLDY

SEQ ID NO: 122 - protein, 10 aa, artificial sequence
  CDRH3 M9 mutant
YYDDQYCLDY

SEQ ID NO: 123 - protein, 10 aa, artificial sequence
  CDRH3 M10 mutant
YYDDPYCLDY

SEQ ID NO: 124 - protein, 10 aa, artificial sequence
  CDRH3 M11 mutant
YFNDHYCLDY

SEQ ID NO: 125 - protein, 10 aa, artificial sequence
  CDRH3 M13 mutant
YYNDQYCLDY

SEQ ID NO: 126 - protein, 10 aa, artificial sequence
  CDRH3 M20 mutant
YHDDPYCLDY

SEQ ID NO: 127 - protein, 10 aa, artificial sequence
  CDRH3 M76 mutant
YYDDNYCLDY

SEQ ID NO: 128 - DNA, 354 bp, artificial sequence
  CCR5 Heavy chain
cagctggagcagtctggacctgaactgaagaagcctggagagacagtcacgatctcctgcaaggcttctgggtataccttcacgaagttcggaatgaactgggtgaagcaggctccaggaaagggtttaaagtggatgggctggatacacacctccactggagagccaacatattctgatgacttcaagggacggtttgccttctctttggaaacgtctgccagcactgcctatttgcggatcaacaacctcaaaaatgaggacatggctaaatacttctgtgccagaggtggtccttacgtaaggggtgctttggactactggggtcaaggaacctcagtcaccgtctcctcc

SEQ ID NO: 129 - protein, 118 aa, artificial sequence
  CCR5 Heavy chain
QLEQSGPELKKPGETVTISCKASGYTFTKFGMNWVKQAPGKGLKWMGWIHTSTGEPTYSDDFKGRFAFSLETSASTAYLRINNLKNEDMAKYFCARGGPYVRGALDYWGQGTSVTVSS

SEQ ID NO: 130 - DNA, 333 bp, artificial sequence
  CCR5 Light chain
gacattatcctgatccaatctccaccttctttggctgtgtctctagggcagagggccaccatctcctgcagaaccagcgaaaatgttgacggatacggcattagttttataaactggtaccaacagaagccaggacagccacccaaactcctcatctatgctgcatcccaccaaggatccggggtccctgccagatttagtggcagtgggtctgggacagacttcagcctcaacatccatcctttggaggaggatgatactgcaatgtatttctgtcaccaaagtaagaaggttccgtggacgttcggtggaggcaccaagctggaaatcaaa

SEQ ID NO: 131 - protein, 111 aa, artificial sequence
  CCR5 Light chain
DIILIQSPPSLAVSLGQRATISCRTSENVDGYGISFINWYQQKPGQPPKLLIYAASHQGSGVPARFSGSGSGTDFSLNIHPLEEDDTAMYFCHQSKKVPWTFGGGTKLEIK

SEQ ID NO: 132 - DNA, 360 bp, artificial sequence
  EpCAM5-10 heavy chain
gaggtgcagctgctcgagcagtctggagctgagctggtaaggcctgggacttcagtgaagatatcctgcaaggcttctggatacgccttcactaactactggctaggttgggtaaagcagaggcctggacatggacttgagtggattggagatattttccctggaagtggtaatatccactacaatgagaagttcaagggcaaagccacactgactgcagacaaatcttcgagcacagcctatatgcagctcagtagcctgacatttgaggactctgctgtctatttctgtgcaagactgaggaactgggacgagcctatggactactggggccaagggaccacggtcaccgtctcctca

SEQ ID NO: 133 - protein, 120 aa, artificial sequence
  EpCAM5-10 heavy chain
EVQLLEQSGAELVRPGTSVKISCKASGYAFTNYWLGWVKQRPGHGLEWIGDIFPGSGNIHYNEKFKGKATLTADKSSSTAYMQLSSLTFEDSAVYFCARLRNWDEPMDYWGQGTTVTVSS

SEQ ID NO: 134 - DNA, 339 bp, artificial sequence
  EpCAM5-10 light chain
gagctcgtgatgacacagtctccatcctccctgactgtgacagcaggagagaaggtcactatgagctgcaagtccagtcagagtctgttaaacagtggaaatcaaaagaactacttgacctggtaccagcagaaaccagggcagcctcctaaactgttgatctactgggcatccactagggaatctggggtccctgatcgcttcacaggcagtggatctggaacagatttcactctcaccatcagcagtgtgcaggctgaagacctggcagtttattactgtcagaatgattatagttatccgctcacgttcggtgctgggaccaagcttgagatcaaa

SEQ ID NO: 135 - protein, 113 aa, artificial sequence
  EpCAM 5-10 light chain
ELVMTQSPSSLTVTAGEKVTMSCKSSQSLLNSGNQKNYLTWYQQKPGQPPKLLIYWASTRESGVPDRFTGSGSGTDFTLTISSVQAEDLAVYYCQNDYSYPLTFGAGTKLEIK

SEQ ID NO: 136 - DNA, 360 bp, artificial sequence
  EpCAM 3-1 VH
gaggtgcagctgctcgagcagtctggagctgagctggtgaaacctggggcctcagtgaagatatcctgcaaggcttctggatacgccttcactaactactggctaggttgggtaaagcagaggcctggacatggacttgagtggattggagatcttttccctggaagtggtaatactcactacaatgagaggttcaggggcaaagccacactgactgcagacaaatcctcgagcacagcctttatgcagctcagtagcctgacatctgaggactctgctgtctatttctgtgcaagattgaggaactgggacgaggctatggactactggggccaagggaccacggtcaccgtctcctca

SEQ ID NO: 137 - protein, 120 aa, artificial sequence
  EpCAM 3-1 VH
EVQLLEQSGAELVKPGASVKISCKASGYAFTNYWLGWVKQRPGHGLEWIGDLFPGSGNTHYNERFRGKATLTADKSSSTAFMQLSSLTSEDSAVYFCARLRNWDEAMDYWGQGTTVTVSS

SEQ ID NO: 138 - DNA, 321 bp, artificial sequence
  EpCAM 3-1 VL
gagctcgtcatgacccagtctccatcttatcttgctgcatctcctggagaaaccattactattaattgcagggcaagtaagagcattagcaaatatttagcctggtatcaagagaaacctgggaaaactaataagcttcttatctactctggatccactttgcaatctggaattccatcaaggttcagtggcagtggatctggtacagatttcactctcaccatcagtagcctggagcctgaagattttgcaatgtattactgtcaacagcataatgaatatccgtacacgttcggaggggggaccaagcttgagatcaaa

SEQ ID NO: 139 - protein, 107 aa, artificial sequence
  EpCAM 3-1 VL
ELVMTQSPSYLAASPGETITINCRASKSISKYLAWYQEKPGKTNKLLIYSGSTLQSGIPSRFSGSGSGTDFTLTISSLEPEDFAMYYCQQHNEYPYTFGGGTKLEIK

SEQ ID NO: 140 - DNA, 372 bp, artificial sequence
  EpCAM 3-5 VH
gaggtgcagctgctcgagcagtctggagctgagctggtaaggcctgggacttcagtgaagctgtcctgcaaggcttctggctacaccttcacaagctatggtttaagctgggtgaagcagagaactggacagggccttgagtggattggagaggtttatcctagaattggtaatgcttactacaatgagaagttcaagggcaaggccacactgactgcagacaaatcctccagcacagcgtccatggagctccgcagcctgacatctgaggactctgcggtctatttctgtgcaagacggggatcctacggtagtaactacgactggtacttcgatgtctggggccaagggaccacggtcaccgtctcctca

SEQ ID NO: 141 - protein, 124 aa, artificial sequence
  EpCAM 3-5 VH
EVQLLEQSGAELVRPGTSVKLSCKASGYTFTSYGLSWVKQRTGQGLEWIGEVYPRIGNAYYNEKFKGKATLTADKSSSTASMELRSLTSEDSAVYFCARRGSYGSNYDWYFDVWGQGTTVTVSS

SEQ ID NO: 142 - DNA, 336 bp, artificial sequence
  EpCAM 3-5 VL
gagctcgtgatgacccagactccactctccctgcctgtcagtcttggagatcaagcctccatctcttgcagatctagtcagagccttgtacacagtaatggaaacacctatttacattggtacctgcagaagccaggccagtctccaaagctcctgatctacaaagtttccaaccgattttctggggtcccagacaggttcagtggcagtggatcagggacagatttcacactcaagatcagcagagtggaggctgaggatctgggagtttatttctgctctcaaagtacacatgttccgtacacgttcggaggggggaccaagcttgagatcaaa

SEQ ID NO: 143 - protein, 112 aa, artificial sequence
  EpCAM 3-5 VL
ELVMTQTPLSLPVSLGDQASISCRSSQSLVHSNGNTYLHWYLQKPGQSPKLLIYKVSNRFSGVPDRFSGSGSGTDFTLKISRVEAEDLGVYFCSQSTHVPYTFGGGTKLEIK

SEQ ID NO: 144 - DNA, 360 bp, artificial sequence
  EpCAM 4-1 VH
gaggtgcagctgctcgagcagtctggagctgagctggtaaggcctgggacttcagtgaagatatcctgcaaggcttctggatacgccttcactaactactggctaggttgggttaagcagaggcctggacatggacttgaatgggttggagatattttccctggaagtggtaatgctcactacaatgagaagttcaagggcaaagccacactgactgcagacaagtcctcgtacacagcctatatgcagctcagtagcctgacatctgaggactctgctgtctatttctgtgcaagattgcggaactgggacgaggctatggactactggggccaagggaccacggtcaccgtctcctca

SEQ ID NO: 145 - protein, 120 aa, artificial sequence
  EpCAM 4-1 VH
EVQLLEQSGAELVRPGTSVKISCKASGYAFTNYWLGWVKQRPGHGLEWVGDIFPGSGNAHYNEKFKGKATLTADKSSYTAYMQLSSLTSEDSAVYFCARLRNWDEAMDYWGQGTTVTVSS

SEQ ID NO: 146 - DNA, 339 bp, artificial sequence
  EpCAM 4-1 VL
gagctcgtgatgacacagtctccatcctccctgagtgtgtcagcaggagagaaggtcactatgagctgcaagtccagtcagagtctgttaaacagtggaaatcaaaagaactacttggcctggtaccagcagaaaccagggcagcctcctaaactgttgatctacggggcatccactagggaatctggggtccctgatcgcttcacaggcagtggatctggaacagatttcactctcaccatcagcagtgtgcaggctgaagacctggcagtttattactgtcagaatgattatagttatccgtacacgttcggaggggggaccaagcttgagatcaaa

SEQ ID NO: 147 - protein, 113 aa, artificial sequence
  EpCAM 4-1 VL
ELVMTQSPSSLSVSAGEKVTMSCKSSQSLLNSGNQKNYLAWYQQKPGQPPKLLIYGASTRESGVPDRFTGSGSGTDFTLTISSVQAEDLAVYYCQNDYSYPYTFGGGTKLEIK

SEQ ID NO: 148 - DNA, 372 bp, artificial sequence
  EpCAM 4-7 VH
gaggtgcagctgctcgagcagtctggagctgagctggcgaggcctggggcttcagtgaagctgtcctgcaaggcttctggctacaccttcacaaactatggtttaagctgggtgaagcagaggcctggacaggtccttgagtggattggagaggtttatcctagaattggtaatgcttactacaatgagaagttcaagggcaaggccacactgactgcagacaaatcctccagcacagcgtccatggagctccgcagcctgacctctgaggactctgcggtctatttctgtgcaagacggggatcctacgatactaactacgactggtacttcgatgtctggggccaagggaccacggtcaccgtctcctca

SEQ ID NO: 149 - protein, 124 aa, artificial sequence
  EpCAM 4-7 VH
EVQLLEQSGAELARPGASVKLSCKASGYTFTNYGLSWVKQRPGQVLEWIGEVYPRIGNAYYNEKFKGKATLTADKSSSTASMELRSLTSEDSAVYFCARRGSYDTNYDWYFDVWGQGTTVTVSS

SEQ ID NO: 150 - DNA, 336 bp, artificial sequence; identical to SEQ ID NO: 142
  EpCAM 4-7 VL

SEQ ID NO: 151 - protein, 112 aa, artificial sequence; identical to SEQ ID NO: 143
  EpCAM 4-7 VL

SEQ ID NO: 152 - protein, 25 aa, artificial sequence
  VH5 Framework 1
DVQLVQSGAEVKKPGASVKVSCKAS

SEQ ID NO: 153 - protein, 25 aa, artificial sequence
  VH7 Framework 1
DVQLVQSGAEVKKPGASVKVSCKAS

SEQ ID NO: 154 - protein, 25 aa, artificial sequence
  VH2 Framework 1
DVQLVQSGAEVKKPGASVKVSCKAS

SEQ ID NO: 155 - protein, 25 aa, artificial sequence
  VH3 Framework 1
DVQLVQSGAEVKKPGASVKVSCKAS

SEQ ID NO: 156 - protein, 15 aa, artificial sequence
  VH5 Framework 2
WVRQAPGQGLEWIGY

SEQ ID NO: 157 - protein, 15 aa, artificial sequence
  VH7 Framework 2
WVRQAPGQGLEWIGY

SEQ ID NO: 158 - protein, 22 aa, artificial sequence
  VH2 Framework 2
WVRQAPGQGLEWIGYINPSRGY

SEQ ID NO: 159 - protein, 22 aa, artificial sequence
  VH3 Framework 2
WVRQAPGQGLEWIGYINPSRGY

SEQ ID NO: 160 - protein, 32 aa, artificial sequence
  VH5 Framework 3
RFTITTDKSTSTAYMELSSLRSEDTATYYCAR

SEQ ID NO: 161 - protein, 32 aa, artificial sequence
  VH7 Framework 3
RVTITTDKSTSTAYMELSSLRSEDTAVYYCAR

SEQ ID NO: 162 - protein, 32 aa, artificial sequence
  VH2 Framework 3
RVTMTTDTSTSTAYMELSSLRSEDTATYYCAR

SEQ ID NO: 163 - protein, 32 aa, artificial sequence
  VH3 Framework 3
RVTMTTDTSTSTAYLQMNSLKTEDTAVYYCAR

SEQ ID NO: 164 - protein, 11 aa, artificial sequence
  VH5 Framework 4
WGQGTTVTVSS

SEQ ID NO: 165 - protein, 11 aa, artificial sequence
  VH7 Framework 4
WGQGTTVTVSS

SEQ ID NO: 166 - protein, 11 aa, artificial sequence
  VH2 Framework 4
WGQGTTVTVSS

SEQ ID NO: 167 - protein, 11 aa, artificial sequence
  VH3 Framework 4
WGQGTTVTVSS

SEQ ID NO: 168 - protein, 15 aa, artificial sequence
  Standard linker
GGGGSGGGGSGGGGS

SEQ ID NO: 169 - DNA, 366 bp, artificial sequence
  CD20VH
caggtgcaactgcggcagcctggggctgagctggtgaagcctggggcctcagtgaagatgtcctgcaaggcttctggctacacatttaccagttacaatatgcactgggtaaagcagacacctggacagggcctggaatggattggagctatttatccaggaaatggtgatacttcctacaatcagaagttcaaaggcaaggccacattgactgcagacaaatcctccagcacagcctacatgcagctcagcagtctgacatctgaggactctgcggtctattactgtgcaagatcgcactacggtagtaactacgtagactactttgactactggggccaaggcacactagtcacagtctcgaca

SEQ ID NO: 170 - protein, 122 aa, artificial sequence
  CD20VH
QVQLRQPGAELVKPGASVKMSCKASGYTFTSYNMHWVKQTPGQGLEWIGAIYPGNGDTSYNQKFKGKATLTADKSSSTAYMQLSSLTSEDSAVYYCARSHYGSNYVDYFDYWGQGTLVTVST

SEQ ID NO: 171 - DNA, 318 bp, artificial sequence
  CD20VL
caaattgttctctcccagtctccagcaatcctttctgcatctccaggggagaaggtcacaatgacttgcagggccagctcaagtttaagtttcatgcactggtaccagcagaagccaggatcctcccccaaaccctggatttatgccacatccaacctggcttctggagtccctgctcgcttcagtggcagtgggtctgggacctcttactctctcacaatcagcagagtggaggctgaagatgctgccacttatttctgccatcagtggagtagtaacccgctcacgttcggtgctgggacaaaggtggaaataaaa

SEQ ID NO: 172 - protein, 106 aa, artificial sequence
  CD20VL
QIVLSQSPAILSASPGEKVTMTCRASSSLSFMHWYQQKPGSSPKPWIYATSNLASGVPARFSGSGSGTSYSLTISRVEAEDAATYFCHQWSSNPLTFGAGTKVEIK

SEQ ID NO: 173 - DNA, 15 bp, artificial sequence
  GGGGS linker
ggaggtggtggatcc

SEQ ID NO: 174 - protein, 5 aa, artificial sequence
  GGGGS linker
GGGGS

SEQ ID NO: 175 - DNA, 18 bp, artificial sequence
  SGGGGS linker
tccggaggtggtggatcc

SEQ ID NO: 176 - protein, 6 aa, artificial sequence
  SGGGGS linker
SGGGGS

SEQ ID NO: 177 - DNA, 1527 bp, artificial sequence
  antiCD19xantiCD3 VH2VL1
gatatccagctgacccagtctccagcttctttggctgtgtctctagggcagagggccaccatctcctgcaaggccagccaaagtgttgattatgatggtgatagttatttgaactggtaccaacagattccaggacagccacccaaactcctcatctatgatgcatccaatctagtttctgggatcccacccaggtttagtggcagtgggtctgggacagacttcaccctcaacatccatcctgtggagaaggtggatgctgcaacctatcactgtcagcaaagtactgaggatccgtggacgttcggtggagggaccaagctcgagatcaaaggtggtggtggttctggcggcggcggctccggtggtggtggttctcaggtgcagctgcagcagtctggggctgagctggtgaggcctgggtcctcagtgaagatttcctgcaaggcttctggctatgcattcagtagctactggatgaactgggtgaagcagaggcctggacagggtcttgagtggattggacagatttggcctggagatggtgatactaactacaatggaaagttcaagggtaaagccactctgactgcagacgaatcctccagcacagcctacatgcaactcagcagcctagcatctgaggactctgcggtctatttctgtgcaagacgggagactacgacggtaggccgttattactatgctatggactactggggccaagggaccacggtcaccgtctcctccggaggtggtggctccgacgtccaactggtgcagtcaggggctgaagtgaaaaaacctggggcctcagtgaaggtgtcctgcaaggcttctggctacaccgctactaggtacacgatgcactgggtaaggcaggcacctggacagggtctggaatggattggatacattaatcctagccgtggttatactaattacgcacagaagttgcagggccgcgtcacaatgactacagacacttccaccagcacagcctacatggaactgagcagcctgcgttctgaggacactgcaacctattactgtgcaagatattatgatgatcattactgccttgactactggggccaaggcaccacggtcaccgtctcctcaggcgaaggtactagtactggttctggtggaagtggaggttcaggtggagcagacgacattcagatgacccagtctccatctagcctgtctgcatctgtcggggaccgtgtcaccatcacctgcagagccagtcaaagtgtaagttacatgaactggtaccagcagaagccgggcaaggcacccaaaagatggatttatgacacatccaaagtggcttctggagtccctgctcgcttcagtggcagtgggtctgggaccgactactctctcacaatcaacagcttggaggctgaagatgctgccacttattactgccaacagtggagtagtaacccgctcacgttcggtggcgggaccaaggtggagatcaaacatcatcaccatcatcattagagatctgtcgac

SEQ ID NO: 178 - protein, 498 aa, artificial sequence
  antiCD19xantiCD3 VH2VL1
DIQLTQSPASLAVSLGQRATISCKASQSVDYDGDSYLNWYQQIPGQPPKLLIYDASNLVSGIPPRFSGSGSGTDFTLNIHPVEKVDAATYHCQQSTEDPWTFGGGTKLEIKGGGGSGGGGSGGGGSQVQLQQSGAELVRPGSSVKISCKASGYAFSSYWMNWVKQRPGQGLEWIGQIWPGDGDTNYNGKFKGKATLTADESSSTAYMQLSSLASEDSAVYFCARRETTTVGRYYYAMDYWGQGTTVTVSSGGGGSDVQLVQSGAEVKKPGASVKVSCKASGYTATRYTMHWVRQAPGQGLEWIGYINPSRGYTNYAQKLQGRVTMTTDTSTSTAYMELSSLRSEDTATYYCARYYDDHYCLDYWGQGTTVTVSSGEGTSTGSGGSGGSGGADDIQMTQSPSSLSASVGDRVTITCRASQSVSYMNWYQQKPGKAPKRWIYDTSKVASGVPARFSGSGSGTDYSLTINSLEAEDAATYYCQQWSSNPLTFGGGTKVEIK

SEQ ID NO: 179 - DNA, 1527 bp, artificial sequence
  antiCD19xantiCD3 VH2VL2
gatatccagctgacccagtctccagcttctttggctgtgtctctagggcagagggccaccatctcctgcaaggccagccaaagtgttgattatgatggtgatagttatttgaactggtaccaacagattccaggacagccacccaaactcctcatctatgatgcatccaatctagtttctgggatcccacccaggtttagtggcagtgggtctgggacagacttcaccctcaacatccatcctgtggagaaggtggatgctgcaacctatcactgtcagcaaagtactgaggatccgtggacgttcggtggagggaccaagctcgagatcaaaggtggtggtggttctggcggcggcggctccggtggtggtggttctcaggtgcagctgcagcagtctggggctgagctggtgaggcctgggtcctcagtgaagatttcctgcaaggcttctggctatgcattcagtagctactggatgaactgggtgaagcagaggcctggacagggtcttgagtggattggacagatttggcctggagatggtgatactaactacaatggaaagttcaagggtaaagccactctgactgcagacgaatcctccagcacagcctacatgcaactcagcagcctagcatctgaggactctgcggtctatttctgtgcaagacgggagactacgacggtaggccgttattactatgctatggactactggggccaagggaccacggtcaccgtctcctccggaggtggtggctccgacgtccaactggtgcagtcaggggctgaagtgaaaaaacctggggcctcagtgaaggtgtcctgcaaggcttctggctacaccgctactaggtacacgatgcactgggtaaggcaggcacctggacagggtctggaatggattggatacattaatcctagccgtggttatactaattacgcacagaagttgcagggccgcgtcacaatgactacagacacttccaccagcacagcctacatggaactgagcagcctgcgttctgaggacactgcaacctattactgtgcaagatattatgatgatcattactgccttgactactggggccaaggcaccacggtcaccgtctcctcaggcgaaggtactagtactggttctggtggaagtggaggttcaggtggagcagacgacattgtactgacccagtctccagcaactctgtctctgtctccaggggagcgtgccaccctgagctgcagagccagtcaaagtgtaagttacatgaactggtaccagcagaagccgggcaaggcacccaaaagatggatttatgacacatccaaagtggcttctggagtccctgctcgcttcagtggcagtgggtctgggaccgactactctctcacaatcaacagcttggaggctgaagatgctgccacttattactgccaacagtggagtagtaacccgctcacgttcggtggcgggaccaaggtggagatcaaacatcatcaccatcatcattagagatctgtcgac

SEQ ID NO: 180 - protein, 498 aa, artificial sequence
  antiCD19xantiCD3 VH2VL2
DIQLTQSPASLAVSLGQRATISCKASQSVDYDGDSYLNWYQQIPGQPPKLLIYDASNLVSGIPPRFSGSGSGTDFTLNIHPVEKVDAATYHCQQSTEDPWTFGGGTKLEIKGGGGSGGGGSGGGGSQVQLQQSGAELVRPGSSVKISCKASGYAFSSYWMNWVKQRPGQGLEWIGQIWPGDGDTNYNGKFKGKATLTADESSSTAYMQLSSLASEDSAVYFCARRETTTVGRYYYAMDYWGQGTTVTVSSGGGGSDVQLVQSGAEVKKPGASVKVSCKASGYTATRYTMHWVRQAPGQGLEWIGYINPSRGYTNYAQKLQGRVTMTTDTSTSTAYMELSSLRSEDTATYYCARYYDDHYCLDYWGQGTTVTVSSGEGTSTGSGGSGGSGGADDIVLTQSPATLSLSPGERATLSCRASQSVSYMNWYQQKPGKAPKRWIYDTSKVASGVPARFSGSGSGTDYSLTINSLEAEDAATYYCQQWSSNPLTFGGGTKVEIK

SEQ ID NO: 181 - DNA, 1527 bp, artificial sequence
  antiCD19xantiCD3 VH2VL3
gatatccagctgacccagtctccagcttctttggctgtgtctctagggcagagggccaccatctcctgcaaggccagccaaagtgttgattatgatggtgatagttatttgaactggtaccaacagattccaggacagccacccaaactcctcatctatgatgcatccaatctagtttctgggatcccacccaggtttagtggcagtgggtctgggacagacttcaccctcaacatccatcctgtggagaaggtggatgctgcaacctatcactgtcagcaaagtactgaggatccgtggacgttcggtggagggaccaagctcgagatcaaaggtggtggtggttctggcggcggcggctccggtggtggtggttctcaggtgcagctgcagcagtctggggctgagctggtgaggcctgggtcctcagtgaagatttcctgcaaggcttctggctatgcattcagtagctactggatgaactgggtgaagcagaggcctggacagggtcttgagtggattggacagatttggcctggagatggtgatactaactacaatggaaagttcaagggtaaagccactctgactgcagacgaatcctccagcacagcctacatgcaactcagcagcctagcatctgaggactctgcggtctatttctgtgcaagacgggagactacgacggtaggccgttattactatgctatggactactggggccaagggaccacggtcaccgtctcctccggaggtggtggctccgacgtccaactggtgcagtcaggggctgaagtgaaaaaacctggggcctcagtgaaggtgtcctgcaaggcttctggctacaccgctactaggtacacgatgcactgggtaaggcaggcacctggacagggtctggaatggattggatacattaatcctagccgtggttatactaattacgcacagaagttgcagggccgcgtcacaatgactacagacacttccaccagcacagcctacatggaactgagcagcctgcgttctgaggacactgcaacctattactgtgcaagatattatgatgatcattactgccttgactactggggccaaggcaccacggtcaccgtctcctcaggcgaaggtactagtactggttctggtggaagtggaggttcaggtggagcagacgacattgtactgacccagtctccagcaactctgtctctgtctccaggggagcgtgccaccctgacctgcagagccagttcaagtgtaagttacatgaactggtaccagcagaagccgggcaaggcacccaaaagatggatttatgacacatccaaagtggcttctggagtccctgctcgcttcagtggcagtgggtctgggaccgactactctctcacaatcaacagcttggaggctgaagatgctgccacttattactgccaacagtggagtagtaacccgctcacgttcggtggcgggaccaaggtggagatcaaacatcatcaccatcatcattagagatctgtcgac

SEQ ID NO: 182 - protein, 498 aa, artificial sequence
  antiCD19xantiCD3 VH2VL3
DIQLTQSPASLAVSLGQRATISCKASQSVDYDGDSYLNWYQQIPGQPPKLLIYDASNLVSGIPPRFSGSGSGTDFTLNIHPVEKVDAATYHCQQSTEDPWTFGGGTKLEIKGGGGSGGGGSGGGGSQVQLQQSGAELVRPGSSVKISCKASGYAFSSYWMNWVKQRPGQGLEWIGQIWPGDGDTNYNGKFKGKATLTADESSSTAYMQLSSLASEDSAVYFCARRETTTVGRYYYAMDYWGQGTTVTVSSGGGGSDVQLVQSGAEVKKPGASVKVSCKASGYTATRYTMHWVRQAPGQGLEWIGYINPSRGYTNYAQKLQGRVTMTTDTSTSTAYMELSSLRSEDTATYYCARYYDDHYCLDYWGQGTTVTVSSGEGTSTGSGGSGGSGGADDIVLTQSPATLSLSPGERATLTCRASSSVSYMNWYQQKPGKAPKRWIYDTSKVASGVPARFSGSGSGTDYSLTINSLEAEDAATYYCQQWSSNPLTFGGGTKVEIK

SEQ ID NO: 183 - DNA, 1527 bp, artificial sequence
  antiCD19xantiCD3 VH3VL1
gatatccagctgacccagtctccagcttctttggctgtgtctctagggcagagggccaccatctcctgcaaggccagccaaagtgttgattatgatggtgatagttatttgaactggtaccaacagattccaggacagccacccaaactcctcatctatgatgcatccaatctagtttctgggatcccacccaggtttagtggcagtgggtctgggacagacttcaccctcaacatccatcctgtggagaaggtggatgctgcaacctatcactgtcagcaaagtactgaggatccgtggacgttcggtggagggaccaagctcgagatcaaaggtggtggtggttctggcggcggcggctccggtggtggtggttctcaggtgcagctgcagcagtctggggctgagctggtgaggcctgggtcctcagtgaagatttcctgcaaggcttctggctatgcattcagtagctactggatgaactgggtgaagcagaggcctggacagggtcttgagtggattggacagatttggcctggagatggtgatactaactacaatggaaagttcaagggtaaagccactctgactgcagacgaatcctccagcacagcctacatgcaactcagcagcctagcatctgaggactctgcggtctatttctgtgcaagacgggagactacgacggtaggccgttattactatgctatggactactggggccaagggaccacggtcaccgtctcctccggaggtggtggctccgacgtccaactggtgcagtcaggggctgaagtgaaaaaacctggggcctcagtgaaggtgtcctgcaaggcttctggctacaccgctactaggtacacgatgcactgggtaaggcaggcacctggacagggtctggaatggattggatacattaatcctagccgtggttatactaattacgcacagaagttgcagggccgcgtcacaatgactacagacacttccaccagcacagcctacctgcaaatgaacagcctgaaaactgaggacactgcagtctattactgtgcaagatattatgatgatcattactgccttgactactggggccaaggcaccacggtcaccgtctcctcaggcgaaggtactagtactggttctggtggaagtggaggttcaggtggagcagacgacattcagatgacccagtctccatctagcctgtctgcatctgtcggggaccgtgtcaccatcacctgcagagccagtcaaagtgtaagttacatgaactggtaccagcagaagccgggcaaggcacccaaaagatggatttatgacacatccaaagtggcttctggagtccctgctcgcttcagtggcagtgggtctgggaccgactactctctcacaatcaacagcttggaggctgaagatgctgccacttattactgccaacagtggagtagtaacccgctcacgttcggtggcgggaccaaggtggagatcaaacatcatcaccatcatcattagagatctgtcgac

SEQ ID NO: 184 - protein, 498 aa, artificial sequence
  antiCD19xantiCD3 VH3VL1
DIQLTQSPASLAVSLGQRATISCKASQSVDYDGDSYLNWYQQIPGQPPKLLIYDASNLVSGIPPRFSGSGSGTDFTLNIHPVEKVDAATYHCQQSTEDPWTFGGGTKLEIKGGGGSGGGGSGGGGSQVQLQQSGAELVRPGSSVKISCKASGYAFSSYWMNWVKQRPGQGLEWIGQIWPGDGDTNYNGKFKGKATLTADESSSTAYMQLSSLASEDSAVYFCARRETTTVGRYYYAMDYWGQGTTVTVSSGGGGSDVQLVQSGAEVKKPGASVKVSCKASGYTATRYTMHWVRQAPGQGLEWIGYINPSRGYTNYAQKLQGRVTMTTDTSTSTAYLQMNSLKTEDTAVYYCARYYDDHYCLDYWGQGTTVTVSSGEGTSTGSGGSGGSGGADDIQMTQSPSSLSASVGDRVTITCRASQSVSYMNWYQQKPGKAPKRWIYDTSKVASGVPARFSGSGSGTDYSLTINSLEAEDAATYYCQQWSSNPLTFGGGTKVEIK

SEQ ID NO: 185 - DNA, 1527 bp, artificial sequence
  antiCD19xantiCD3 VH3VL2
gatatccagctgacccagtctccagcttctttggctgtgtctctagggcagagggccaccatctcctgcaaggccagccaaagtgttgattatgatggtgatagttatttgaactggtaccaacagattccaggacagccacccaaactcctcatctatgatgcatccaatctagtttctgggatcccacccaggtttagtggcagtgggtctgggacagacttcaccctcaacatccatcctgtggagaaggtggatgctgcaacctatcactgtcagcaaagtactgaggatccgtggacgttcggtggagggaccaagctcgagatcaaaggtggtggtggttctggcggcggcggctccggtggtggtggttctcaggtgcagctgcagcagtctggggctgagctggtgaggcctgggtcctcagtgaagatttcctgcaaggcttctggctatgcattcagtagctactggatgaactgggtgaagcagaggcctggacagggtcttgagtggattggacagatttggcctggagatggtgatactaactacaatggaaagttcaagggtaaagccactctgactgcagacgaatcctccagcacagcctacatgcaactcagcagcctagcatctgaggactctgcggtctatttctgtgcaagacgggagactacgacggtaggccgttattactatgctatggactactggggccaagggaccacggtcaccgtctcctccggaggtggtggctccgacgtccaactggtgcagtcaggggctgaagtgaaaaaacctggggcctcagtgaaggtgtcctgcaaggcttctggctacaccgctactaggtacacgatgcactgggtaaggcaggcacctggacagggtctggaatggattggatacattaatcctagccgtggttatactaattacgcacagaagttgcagggccgcgtcacaatgactacagacacttccaccagcacagcctacctgcaaatgaacagcctgaaaactgaggacactgcagtctattactgtgcaagatattatgatgatcattactgccttgactactggggccaaggcaccacggtcaccgtctcctcaggcgaaggtactagtactggttctggtggaagtggaggttcaggtggagcagacgacattgtactgacccagtctccagcaactctgtctctgtctccaggggagcgtgccaccctgagctgcagagccagtcaaagtgtaagttacatgaactggtaccagcagaagccgggcaaggcacccaaaagatggatttatgacacatccaaagtggcttctggagtccctgctcgcttcagtggcagtgggtctgggaccgactactctctcacaatcaacagcttggaggctgaagatgctgccacttattactgccaacagtggagtagtaacccgctcacgttcggtggcgggaccaaggtggagatcaaacatcatcaccatcatcattagagatctgtcgac

SEQ ID NO: 186 - protein, 498 aa, artificial sequence
  antiCD19xantiCD3 VH3VL2
DIQLTQSPASLAVSLGQRATISCKASQSVDYDGDSYLNWYQQIPGQPPKLLIYDASNLVSGIPPRFSGSGSGTDFTLNIHPVEKVDAATYHCQQSTEDPWTFGGGTKLEIKGGGGSGGGGSGGGGSQVQLQQSGAELVRPGSSVKISCKASGYAFSSYWMNWVKQRPGQGLEWIGQIWPGDGDTNYNGKFKGKATLTADESSSTAYMQLSSLASEDSAVYFCARRETTTVGRYYYAMDYWGQGTTVTVSSGGGGSDVQLVQSGAEVKKPGASVKVSCKASGYTATRYTMHWVRQAPGQGLEWIGYINPSRGYTNYAQKLQGRVTMTTDTSTSTAYLQMNSLKTEDTAVYYCARYYDDHYCLDYWGQGTTVTVSSGEGTSTGSGGSGGSGGADDIVLTQSPATLSLSPGERATLSCRASQSVSYMNWYQQKPGKAPKRWIYDTSKVASGVPARFSGSGSGTDYSLTINSLEAEDAATYYCQQWSSNPLTFGGGTKVEIK

SEQ ID NO: 187 - DNA, 1527 bp, artificial sequence
  antiCD19xantiCD3 VH3VL3
gatatccagctgacccagtctccagcttctttggctgtgtctctagggcagagggccaccatctcctgcaaggccagccaaagtgttgattatgatggtgatagttatttgaactggtaccaacagattccaggacagccacccaaactcctcatctatgatgcatccaatctagtttctgggatcccacccaggtttagtggcagtgggtctgggacagacttcaccctcaacatccatcctgtggagaaggtggatgctgcaacctatcactgtcagcaaagtactgaggatccgtggacgttcggtggagggaccaagctcgagatcaaaggtggtggtggttctggcggcggcggctccggtggtggtggttctcaggtgcagctgcagcagtctggggctgagctggtgaggcctgggtcctcagtgaagatttcctgcaaggcttctggctatgcattcagtagctactggatgaactgggtgaagcagaggcctggacagggtcttgagtggattggacagatttggcctggagatggtgatactaactacaatggaaagttcaagggtaaagccactctgactgcagacgaatcctccagcacagcctacatgcaactcagcagcctagcatctgaggactctgcggtctatttctgtgcaagacgggagactacgacggtaggccgttattactatgctatggactactggggccaagggaccacggtcaccgtctcctccggaggtggtggctccgacgtccaactggtgcagtcaggggctgaagtgaaaaaacctggggcctcagtgaaggtgtcctgcaaggcttctggctacaccgctactaggtacacgatgcactgggtaaggcaggcacctggacagggtctggaatggattggatacattaatcctagccgtggttatactaattacgcacagaagttgcagggccgcgtcacaatgactacagacacttccaccagcacagcctacctgcaaatgaacagcctgaaaactgaggacactgcagtctattactgtgcaagatattatgatgatcattactgccttgactactggggccaaggcaccacggtcaccgtctcctcaggcgaaggtactagtactggttctggtggaagtggaggttcaggtggagcagacgacattgtactgacccagtctccagcaactctgtctctgtctccaggggagcgtgccaccctgacctgcagagccagttcaagtgtaagttacatgaactggtaccagcagaagccgggcaaggcacccaaaagatggatttatgacacatccaaagtggcttctggagtccctgctcgcttcagtggcagtgggtctgggaccgactactctctcacaatcaacagcttggaggctgaagatgctgccacttattactgccaacagtggagtagtaacccgctcacgttcggtggcgggaccaaggtggagatcaaacatcatcaccatcatcattagagatctgtcgac

SEQ ID NO: 188 - protein, 498 aa, artificial sequence
  antiCD19xantiCD3 VH3VL3
DIQLTQSPASLAVSLGQRATISCKASQSVDYDGDSYLNWYQQIPGQPPKLLIYDASNLVSGIPPRFSGSGSGTDFTLNIHPVEKVDAATYHCQQSTEDPWTFGGGTKLEIKGGGGSGGGGSGGGGSQVQLQQSGAELVRPGSSVKISCKASGYAFSSYWMNWVKQRPGQGLEWIGQIWPGDGDTNYNGKFKGKATLTADESSSTAYMQLSSLASEDSAVYFCARRETTTVGRYYYAMDYWGQGTTVTVSSGGGGSDVQLVQSGAEVKKPGASVKVSCKASGYTATRYTMHWVRQAPGQGLEWIGYINPSRGYTNYAQKLQGRVTMTTDTSTSTAYLQMNSLKTEDTAVYYCARYYDDHYCLDYWGQGTTVTVSSGEGTSTGSGGSGGSGGADDIVLTQSPATLSLSPGERATLTCRASSSVSYMNWYQQKPGKAPKRWIYDTSKVASGVPARFSGSGSGTDYSLTINSLEAEDAATYYCQQWSSNPLTFGGGTKVEIK

SEQ ID NO: 189 - DNA, 1527 bp, artificial sequence
  antiCD19xantiCD3 VH5VL1
gatatccagctgacccagtctccagcttctttggctgtgtctctagggcagagggccaccatctcctgcaaggccagccaaagtgttgattatgatggtgatagttatttgaactggtaccaacagattccaggacagccacccaaactcctcatctatgatgcatccaatctagtttctgggatcccacccaggtttagtggcagtgggtctgggacagacttcaccctcaacatccatcctgtggagaaggtggatgctgcaacctatcactgtcagcaaagtactgaggatccgtggacgttcggtggagggaccaagctcgagatcaaaggtggtggtggttctggcggcggcggctccggtggtggtggttctcaggtgcagctgcagcagtctggggctgagctggtgaggcctgggtcctcagtgaagatttcctgcaaggcttctggctatgcattcagtagctactggatgaactgggtgaagcagaggcctggacagggtcttgagtggattggacagatttggcctggagatggtgatactaactacaatggaaagttcaagggtaaagccactctgactgcagacgaatcctccagcacagcctacatgcaactcagcagcctagcatctgaggactctgcggtctatttctgtgcaagacgggagactacgacggtaggccgttattactatgctatggactactggggccaagggaccacggtcaccgtctcctccggaggtggtggctccgacgtccaactggtgcagtcaggggctgaagtgaaaaaacctggggcctcagtgaaggtgtcctgcaaggcttctggctacacctttactaggtacacgatgcactgggtaaggcaggcacctggacagggtctggaatggattggatacattaatcctagccgtggttatactaattacgcagacagcgtcaagggccgcttcacaatcactacagacaaatccaccagcacagcctacatggaactgagcagcctgcgttctgaggacactgcaacctattactgtgcaagatattatgatgatcattactgccttgactactggggccaaggcaccacggtcaccgtctcctcaggcgaaggtactagtactggttctggtggaagtggaggttcaggtggagcagacgacattcagatgacccagtctccatctagcctgtctgcatctgtcggggaccgtgtcaccatcacctgcagagccagtcaaagtgtaagttacatgaactggtaccagcagaagccgggcaaggcacccaaaagatggatttatgacacatccaaagtggcttctggagtccctgctcgcttcagtggcagtgggtctgggaccgactactctctcacaatcaacagcttggaggctgaagatgctgccacttattactgccaacagtggagtagtaacccgctcacgttcggtggcgggaccaaggtggagatcaaacatcatcaccatcatcattagagatctgtcgac

SEQ ID NO: 190 - protein, 498 aa, artificial sequence
  antiCD19xantiCD3 VH5VL1
DIQLTQSPASLAVSLGQRATISCKASQSVDYDGDSYLNWYQQIPGQPPKLLIYDASNLVSGIPPRFSGSGSGTDFTLNIHPVEKVDAATYHCQQSTEDPWTFGGGTKLEIKGGGGSGGGGSGGGGSQVQLQQSGAELVRPGSSVKISCKASGYAFSSYWMNWVKQRPGQGLEWIGQIWPGDGDTNYNGKFKGKATLTADESSSTAYMQLSSLASEDSAVYFCARRETTTVGRYYYAMDYWGQGTTVTVSSGGGGSDVQLVQSGAEVKKPGASVKVSCKASGYTFTRYTMHWVRQAPGQGLEWIGYINPSRGYTNYADSVKGRFTITTDKSTSTAYMELSSLRSEDTATYYCARYYDDHYCLDYWGQGTTVTVSSGEGTSTGSGGSGGSGGADDIQMTQSPSSLSASVGDRVTITCRASQSVSYMNWYQQKPGKAPKRWIYDTSKVASGVPARFSGSGSGTDYSLTINSLEAEDAATYYCQQWSSNPLTFGGGTKVEIK

SEQ ID NO: 191 - DNA, 1527 bp, artificial sequence
  antiCD19xantiCD3 VH5VL2
gatatccagctgacccagtctccagcttctttggctgtgtctctagggcagagggccaccatctcctgcaaggccagccaaagtgttgattatgatggtgatagttatttgaactggtaccaacagattccaggacagccacccaaactcctcatctatgatgcatccaatctagtttctgggatcccacccaggtttagtggcagtgggtctgggacagacttcaccctcaacatccatcctgtggagaaggtggatgctgcaacctatcactgtcagcaaagtactgaggatccgtggacgttcggtggagggaccaagctcgagatcaaaggtggtggtggttctggcggcggcggctccggtggtggtggttctcaggtgcagctgcagcagtctggggctgagctggtgaggcctgggtcctcagtgaagatttcctgcaaggcttctggctatgcattcagtagctactggatgaactgggtgaagcagaggcctggacagggtcttgagtggattggacagatttggcctggagatggtgatactaactacaatggaaagttcaagggtaaagccactctgactgcagacgaatcctccagcacagcctacatgcaactcagcagcctagcatctgaggactctgcggtctatttctgtgcaagacgggagactacgacggtaggccgttattactatgctatggactactggggccaagggaccacggtcaccgtctcctccggaggtggtggctccgacgtccaactggtgcagtcaggggctgaagtgaaaaaacctggggcctcagtgaaggtgtcctgcaaggcttctggctacacctttactaggtacacgatgcactgggtaaggcaggcacctggacagggtctggaatggattggatacattaatcctagccgtggttatactaattacgcagacagcgtcaagggccgcttcacaatcactacagacaaatccaccagcacagcctacatggaactgagcagcctgcgttctgaggacactgcaacctattactgtgcaagatattatgatgatcattactgccttgactactggggccaaggcaccacggtcaccgtctcctcaggcgaaggtactagtactggttctggtggaagtggaggttcaggtggagcagacgacattgtactgacccagtctccagcaactctgtctctgtctccaggggagcgtgccaccctgagctgcagagccagtcaaagtgtaagttacatgaactggtaccagcagaagccgggcaaggcacccaaaagatggatttatgacacatccaaagtggcttctggagtccctgctcgcttcagtggcagtgggtctgggaccgactactctctcacaatcaacagcttggaggctgaagatgctgccacttattactgccaacagtggagtagtaacccgctcacgttcggtggcgggaccaaggtggagatcaaacatcatcaccatcatcattagagatctgtcgac

SEQ ID NO: 192 - protein, 498 aa, artificial sequence
  antiCD19xantiCD3 VH5VL2
DIQLTQSPASLAVSLGQRATISCKASQSVDYDGDSYLNWYQQIPGQPPKLLIYDASNLVSGIPPRFSGSGSGTDFTLNIHPVEKVDAATYHCQQSTEDPWTFGGGTKLEIKGGGGSGGGGSGGGGSQVQLQQSGAELVRPGSSVKISCKASGYAFSSYWMNWVKQRPGQGLEWIGQIWPGDGDTNYNGKFKGKATLTADESSSTAYMQLSSLASEDSAVYFCARRETTTVGRYYYAMDYWGQGTTVTVSSGGGGSDVQLVQSGAEVKKPGASVKVSCKASGYTFTRYTMHWVRQAPGQGLEWIGYINPSRGYTNYADSVKGRFTITTDKSTSTAYMELSSLRSEDTATYYCARYYDDHYCLDYWGQGTTVTVSSGEGTSTGSGGSGGSGGADDIVLTQSPATLSLSPGERATLSCRASQSVSYMNWYQQKPGKAPKRWIYDTSKVASGVPARFSGSGSGTDYSLTINSLEAEDAATYYCQQWSSNPLTFGGGTKVEIK

SEQ ID NO: 193 - DNA, 1527 bp, artificial sequence
  antiCD19xantiCD3 VH5VL3
gatatccagctgacccagtctccagcttctttggctgtgtctctagggcagagggccaccatctcctgcaaggccagccaaagtgttgattatgatggtgatagttatttgaactggtaccaacagattccaggacagccacccaaactcctcatctatgatgcatccaatctagtttctgggatcccacccaggtttagtggcagtgggtctgggacagacttcaccctcaacatccatcctgtggagaaggtggatgctgcaacctatcactgtcagcaaagtactgaggatccgtggacgttcggtggagggaccaagctcgagatcaaaggtggtggtggttctggcggcggcggctccggtggtggtggttctcaggtgcagctgcagcagtctggggctgagctggtgaggcctgggtcctcagtgaagatttcctgcaaggcttctggctatgcattcagtagctactggatgaactgggtgaagcagaggcctggacagggtcttgagtggattggacagatttggcctggagatggtgatactaactacaatggaaagttcaagggtaaagccactctgactgcagacgaatcctccagcacagcctacatgcaactcagcagcctagcatctgaggactctgcggtctatttctgtgcaagacgggagactacgacggtaggccgttattactatgctatggactactggggccaagggaccacggtcaccgtctcctccggaggtggtggctccgacgtccaactggtgcagtcaggggctgaagtgaaaaaacctggggcctcagtgaaggtgtcctgcaaggcttctggctacacctttactaggtacacgatgcactgggtaaggcaggcacctggacagggtctggaatggattggatacattaatcctagccgtggttatactaattacgcagacagcgtcaagggccgcttcacaatcactacagacaaatccaccagcacagcctacatggaactgagcagcctgcgttctgaggacactgcaacctattactgtgcaagatattatgatgatcattactgccttgactactggggccaaggcaccacggtcaccgtctcctcaggcgaaggtactagtactggttctggtggaagtggaggttcaggtggagcagacgacattgtactgacccagtctccagcaactctgtctctgtctccaggggagcgtgccaccctgacctgcagagccagttcaagtgtaagttacatgaactggtaccagcagaagccgggcaaggcacccaaaagatggatttatgacacatccaaagtggcttctggagtccctgctcgcttcagtggcagtgggtctgggaccgactactctctcacaatcaacagcttggaggctgaagatgctgccacttattactgccaacagtggagtagtaacccgctcacgttcggtggcgggaccaaggtggagatcaaacatcatcaccatcatcattagagatctgtcgac

SEQ ID NO: 194 - protein, 498 aa, artificial sequence
  antiCD19xantiCD3 VH5VL3
DIQLTQSPASLAVSLGQRATISCKASQSVDYDGDSYLNWYQQIPGQPPKLLIYDASNLVSGIPPRFSGSGSGTDFTLNIHPVEKVDAATYHCQQSTEDPWTFGGGTKLEIKGGGGSGGGGSGGGGSQVQLQQSGAELVRPGSSVKISCKASGYAFSSYWMNWVKQRPGQGLEWIGQIWPGDGDTNYNGKFKGKATLTADESSSTAYMQLSSLASEDSAVYFCARRETTTVGRYYYAMDYWGQGTTVTVSSGGGGSDVQLVQSGAEVKKPGASVKVSCKASGYTFTRYTMHWVRQAPGQGLEWIGYINPSRGYTNYADSVKGRFTITTDKSTSTAYMELSSLRSEDTATYYCARYYDDHYCLDYWGQGTTVTVSSGEGTSTGSGGSGGSGGADDIVLTQSPATLSLSPGERATLTCRASSSVSYMNWYQQKPGKAPKRWIYDTSKVASGVPARFSGSGSGTDYSLTINSLEAEDAATYYCQQWSSNPLTFGGGTKVEIK

SEQ ID NO: 195 - DNA, 1527 bp, artificial sequence
  antiCD19xantiCD3 VH7VL1
gatatccagctgacccagtctccagcttctttggctgtgtctctagggcagagggccaccatctcctgcaaggccagccaaagtgttgattatgatggtgatagttatttgaactggtaccaacagattccaggacagccacccaaactcctcatctatgatgcatccaatctagtttctgggatcccacccaggtttagtggcagtgggtctgggacagacttcaccctcaacatccatcctgtggagaaggtggatgctgcaacctatcactgtcagcaaagtactgaggatccgtggacgttcggtggagggaccaagctcgagatcaaaggtggtggtggttctggcggcggcggctccggtggtggtggttctcaggtgcagctgcagcagtctggggctgagctggtgaggcctgggtcctcagtgaagatttcctgcaaggcttctggctatgcattcagtagctactggatgaactgggtgaagcagaggcctggacagggtcttgagtggattggacagatttggcctggagatggtgatactaactacaatggaaagttcaagggtaaagccactctgactgcagacgaatcctccagcacagcctacatgcaactcagcagcctagcatctgaggactctgcggtctatttctgtgcaagacgggagactacgacggtaggccgttattactatgctatggactactggggccaagggaccacggtcaccgtctcctccggaggtggtggctccgacgtccaactggtgcagtcaggggctgaagtgaaaaaacctggggcctcagtgaaggtgtcctgcaaggcttctggctacacctttactaggtacacgatgcactgggtaaggcaggcacctggacagggtctggaatggattggatacattaatcctagccgtggttatactaattacaatcagaagttcaaggaccgcgtcacaatcactacagacaaatccaccagcacagcctacatggaactgagcagcctgcgttctgaggacactgcagtctattactgtgcaagatattatgatgatcattactgccttgactactggggccaaggcaccacggtcaccgtctcctcaggcgaaggtactagtactggttctggtggaagtggaggttcaggtggagcagacgacattcagatgacccagtctccatctagcctgtctgcatctgtcggggaccgtgtcaccatcacctgcagagccagtcaaagtgtaagttacatgaactggtaccagcagaagccgggcaaggcacccaaaagatggatttatgacacatccaaagtggcttctggagtccctgctcgcttcagtggcagtgggtctgggaccgactactctctcacaatcaacagcttggaggctgaagatgctgccacttattactgccaacagtggagtagtaacccgctcacgttcggtggcgggaccaaggtggagatcaaacatcatcaccatcatcattagagatctgtcgac

SEQ ID NO: 196 - protein, 498 aa, artificial sequence
  antiCD19xantiCD3 VH7VL1
DIQLTQSPASLAVSLGQRATISCKASQSVDYDGDSYLNWYQQIPGQPPKLLIYDASNLVSGIPPRFSGSGSGTDFTLNIHPVEKVDAATYHCQQSTEDPWTFGGGTKLEIKGGGGSGGGGSGGGGSQVQLQQSGAELVRPGSSVKISCKASGYAFSSYWMNWVKQRPGQGLEWIGQIWPGDGDTNYNGKFKGKATLTADESSSTAYMQLSSLASEDSAVYFCARRETTTVGRYYYAMDYWGQGTTVTVSSGGGGSDVQLVQSGAEVKKPGASVKVSCKASGYTFTRYTMHWVRQAPGQGLEWIGYINPSRGYTNYNQKFKDRVTITTDKSTSTAYMELSSLRSEDTAVYYCARYYDDHYCLDYWGQGTTVTVSSGEGTSTGSGGSGGSGGADDIQMTQSPSSLSASVGDRVTITCRASQSVSYMNWYQQKPGKAPKRWIYDTSKVASGVPARFSGSGSGTDYSLTINSLEAEDAATYYCQQWSSNPLTFGGGTKVEIK

SEQ ID NO: 197 - DNA, 1527 bp, artificial sequence
  antiCD19xantiCD3 VH7VL2
gatatccagctgacccagtctccagcttctttggctgtgtctctagggcagagggccaccatctcctgcaaggccagccaaagtgttgattatgatggtgatagttatttgaactggtaccaacagattccaggacagccacccaaactcctcatctatgatgcatccaatctagtttctgggatcccacccaggtttagtggcagtgggtctgggacagacttcaccctcaacatccatcctgtggagaaggtggatgctgcaacctatcactgtcagcaaagtactgaggatccgtggacgttcggtggagggaccaagctcgagatcaaaggtggtggtggttctggcggcggcggctccggtggtggtggttctcaggtgcagctgcagcagtctggggctgagctggtgaggcctgggtcctcagtgaagatttcctgcaaggcttctggctatgcattcagtagctactggatgaactgggtgaagcagaggcctggacagggtcttgagtggattggacagatttggcctggagatggtgatactaactacaatggaaagttcaagggtaaagccactctgactgcagacgaatcctccagcacagcctacatgcaactcagcagcctagcatctgaggactctgcggtctatttctgtgcaagacgggagactacgacggtaggccgttattactatgctatggactactggggccaagggaccacggtcaccgtctcctccggaggtggtggctccgacgtccaactggtgcagtcaggggctgaagtgaaaaaacctggggcctcagtgaaggtgtcctgcaaggcttctggctacacctttactaggtacacgatgcactgggtaaggcaggcacctggacagggtctggaatggattggatacattaatcctagccgtggttatactaattacaatcagaagttcaaggaccgcgtcacaatcactacagacaaatccaccagcacagcctacatggaactgagcagcctgcgttctgaggacactgcagtctattactgtgcaagatattatgatgatcattactgccttgactactggggccaaggcaccacggtcaccgtctcctcaggcgaaggtactagtactggttctggtggaagtggaggttcaggtggagcagacgacattgtactgacccagtctccagcaactctgtctctgtctccaggggagcgtgccaccctgagctgcagagccagtcaaagtgtaagttacatgaactggtaccagcagaagccgggcaaggcacccaaaagatggatttatgacacatccaaagtggcttctggagtccctgctcgcttcagtggcagtgggtctgggaccgactactctctcacaatcaacagcttggaggctgaagatgctgccacttattactgccaacagtggagtagtaacccgctcacgttcggtggcgggaccaaggtggagatcaaacatcatcaccatcatcattagagatctgtcgac

SEQ ID NO: 198 - protein, 498 aa, artificial sequence
  antiCD19xantiCD3 VH7VL2
DIQLTQSPASLAVSLGQRATISCKASQSVDYDGDSYLNWYQQIPGQPPKLLIYDASNLVSGIPPRFSGSGSGTDFTLNIHPVEKVDAATYHCQQSTEDPWTFGGGTKLEIKGGGGSGGGGSGGGGSQVQLQQSGAELVRPGSSVKISCKASGYAFSSYWMNWVKQRPGQGLEWIGQIWPGDGDTNYNGKFKGKATLTADESSSTAYMQLSSLASEDSAVYFCARRETTTVGRYYYAMDYWGQGTTVTVSSGGGGSDVQLVQSGAEVKKPGASVKVSCKASGYTFTRYTMHWVRQAPGQGLEWIGYINPSRGYTNYNQKFKDRVTITTDKSTSTAYMELSSLRSEDTAVYYCARYYDDHYCLDYWGQGTTVTVSSGEGTSTGSGGSGGSGGADDIVLTQSPATLSLSPGERATLSCRASQSVSYMNWYQQKPGKAPKRWIYDTSKVASGVPARFSGSGSGTDYSLTINSLEAEDAATYYCQQWSSNPLTFGGGTKVEIK

SEQ ID NO: 199 - DNA, 1527 bp, artificial sequence
  antiCD19xantiCD3 VH7VL3
gatatccagctgacccagtctccagcttctttggctgtgtctctagggcagagggccaccatctcctgcaaggccagccaaagtgttgattatgatggtgatagttatttgaactggtaccaacagattccaggacagccacccaaactcctcatctatgatgcatccaatctagtttctgggatcccacccaggtttagtggcagtgggtctgggacagacttcaccctcaacatccatcctgtggagaaggtggatgctgcaacctatcactgtcagcaaagtactgaggatccgtggacgttcggtggagggaccaagctcgagatcaaaggtggtggtggttctggcggcggcggctccggtggtggtggttctcaggtgcagctgcagcagtctggggctgagctggtgaggcctgggtcctcagtgaagatttcctgcaaggcttctggctatgcattcagtagctactggatgaactgggtgaagcagaggcctggacagggtcttgagtggattggacagatttggcctggagatggtgatactaactacaatggaaagttcaagggtaaagccactctgactgcagacgaatcctccagcacagcctacatgcaactcagcagcctagcatctgaggactctgcggtctatttctgtgcaagacgggagactacgacggtaggccgttattactatgctatggactactggggccaagggaccacggtcaccgtctcctccggaggtggtggctccgacgtccaactggtgcagtcaggggctgaagtgaaaaaacctggggcctcagtgaaggtgtcctgcaaggcttctggctacacctttactaggtacacgatgcactgggtaaggcaggcacctggacagggtctggaatggattggatacattaatcctagccgtggttatactaattacaatcagaagttcaaggaccgcgtcacaatcactacagacaaatccaccagcacagcctacatggaactgagcagcctgcgttctgaggacactgcagtctattactgtgcaagatattatgatgatcattactgccttgactactggggccaaggcaccacggtcaccgtctcctcaggcgaaggtactagtactggttctggtggaagtggaggttcaggtggagcagacgacattgtactgacccagtctccagcaactctgtctctgtctccaggggagcgtgccaccctgacctgcagagccagttcaagtgtaagttacatgaactggtaccagcagaagccgggcaaggcacccaaaagatggatttatgacacatccaaagtggcttctggagtccctgctcgcttcagtggcagtgggtctgggaccgactactctctcacaatcaacagcttggaggctgaagatgctgccacttattactgccaacagtggagtagtaacccgctcacgttcggtggcgggaccaaggtggagatcaaacatcatcaccatcatcattagagatctgtcgac

SEQ ID NO: 200 - protein, 498 aa, artificial sequence
  antiCD19xantiCD3 VH7VL3
DIQLTQSPASLAVSLGQRATISCKASQSVDYDGDSYLNWYQQIPGQPPKLLIYDASNLVSGIPPRFSGSGSGTDFTLNIHPVEKVDAATYHCQQSTEDPWTFGGGTKLEIKGGGGSGGGGSGGGGSQVQLQQSGAELVRPGSSVKISCKASGYAFSSYWMNWVKQRPGQGLEWIGQIWPGDGDTNYNGKFKGKATLTADESSSTAYMQLSSLASEDSAVYFCARRETTTVGRYYYAMDYWGQGTTVTVSSGGGGSDVQLVQSGAEVKKPGASVKVSCKASGYTFTRYTMHWVRQAPGQGLEWIGYINPSRGYTNYNQKFKDRVTITTDKSTSTAYMELSSLRSEDTAVYYCARYYDDHYCLDYWGQGTTVTVSSGEGTSTGSGGSGGSGGADDIVLTQSPATLSLSPGERATLTCRASSSVSYMNWYQQKPGKAPKRWIYDTSKVASGVPARFSGSGSGTDYSLTINSLEAEDAATYYCQQWSSNPLTFGGGTKVEIK

SEQ ID NO: 201 - DNA, 45 bp, artificial sequence
  standard linker
ggtggtggtggttctggcggcggcggctccggtggtggtggttct

SEQ ID NO: 202 - DNA, 54 bp, artificial sequence
  deimmunized linker
ggcgaaggtactagtactggttctggtggaagtggaggttcaggtggagcagac

SEQ ID NO: 203 - DNA, 1494 bp, artificial sequence
  antiCD19xantiCD3
gatatccagctgacccagtctccagcttctttggctgtgtctctagggcagagggccaccatctcctgcaaggccagccaaagtgttgattatgatggtgatagttatttgaactggtaccaacagattccaggacagccacccaaactcctcatctatgatgcatccaatctagtttctgggatcccacccaggtttagtggcagtgggtctgggacagacttcaccctcaacatccatcctgtggagaaggtggatgctgcaacctatcactgtcagcaaagtactgaggatccgtggacgttcggtggagggaccaagctcgagatcaaaggtggtggtggttctggcggcggcggctccggtggtggtggttctcaggtgcagctgcagcagtctggggctgagctggtgaggcctgggtcctcagtgaagatttcctgcaaggcttctggctatgcattcagtagctactggatgaactgggtgaagcagaggcctggacagggtcttgagtggattggacagatttggcctggagatggtgatactaactacaatggaaagttcaagggtaaagccactctgactgcagacgaatcctccagcacagcctacatgcaactcagcagcctagcatctgaggactctgcggtctatttctgtgcaagacgggagactacgacggtaggccgttattactatgctatggactactggggccaagggaccacggtcaccgtctcctccggaggtggtggatccgatatcaaactgcagcagtcaggggctgaactggcaagacctggggcctcagtgaagatgtcctgcaagacttctggctacacctttactaggtacacgatgcactgggtaaaacagaggcctggacagggtctggaatggattggatacattaatcctagccgtggttatactaattacaatcagaagttcaaggacaaggccacattgactacagacaaatcctccagcacagcctacatgcaactgagcagcctgacatctgaggactctgcagtctattactgtgcaagatattatgatgatcattactgccttgactactggggccaaggcaccactctcacagtctcctcagtcgaaggtggaagtggaggttctggtggaagtggaggttcaggtggagtcgacgacattcagctgacccagtctccagcaatcatgtctgcatctccaggggagaaggtcaccatgacctgcagagccagttcaagtgtaagttacatgaactggtaccagcagaagtcaggcacctcccccaaaagatggatttatgacacatccaaagtggcttctggagtcccttatcgcttcagtggcagtgggtctgggacctcatactctctcacaatcagcagcatggaggctgaagatgctgccacttattactgccaacagtggagtagtaacccgctcacgttcggtgctgggaccaagctggagctgaaa

SEQ ID NO: 204 - protein, 498 aa, artificial sequence
  antiCD19xantiCD3
DIQLTQSPASLAVSLGQRATISCKASQSVDYDGDSYLNWYQQIPGQPPKLLIYDASNLVSGIPPRFSGSGSGTDFTLNIHPVEKVDAATYHCQQSTEDPWTFGGGTKLEIKGGGGSGGGGSGGGGSQVQLQQSGAELVRPGSSVKISCKASGYAFSSYWMNWVKQRPGQGLEWIGQIWPGDGDTNYNGKFKGKATLTADESSSTAYMQLSSLASEDSAVYFCARRETTTVGRYYYAMDYWGQGTTVTVSSGGGGSDIKLQQSGAELARPGASVKMSCKTSGYTFTRYTMHWVKQRPGQGLEWIGYINPSRGYTNYNQKFKDKATLTTDKSSSTAYMQLSSLTSEDSAVYYCARYYDDHYCLDYWGQGTTLTVSSVEGGSGGSGGSGGSGGVDDIQLTQSPAIMSASPGEKVTMTCRASSSVSYMNWYQQKSGTSPKRWIYDTSKVASGVPYRFSGSGSGTSYSLTISSMEAEDAATYYCQQWSSNPLTFGAGTKLELK

SEQ ID NO: 205 - DNA, 1476 bp, artificial sequence
  CCR5xanti-CD3 VH5VL1
gacattatcctgatccaatctccaccttctttggctgtgtctctagggcagagggccaccatctcctgcagaaccagcgaaaatgttgacggatacggcattagttttataaactggtaccaacagaagccaggacagccacccaaactcctcatctatgctgcatcccaccaaggatccggggtccctgccagatttagtggcagtgggtctgggacagacttcagcctcaacatccatcctttggaggaggatgatactgcaatgtatttctgtcaccaaagtaagaaggttccgtggacgttcggtggaggcaccaagctggaaatcaaaggtggtggtggttctggcggcggcggctccggtggtggtggttctcagctggagcagtctggacctgaactgaagaagcctggagagacagtcacgatctcctgcaaggcttctgggtataccttcacgaagttcggaatgaactgggtgaagcaggctccaggaaagggtttaaagtggatgggctggatacacacctccactggagagccaacatattctgatgacttcaagggacggtttgccttctctttggaaacgtctgccagcactgcctatttgcggatcaacaacctcaaaaatgaggacatggctaaatacttctgtgccagaggtggtccttacgtaaggggtgctttggactactggggtcaaggaacctcagtcaccgtctcctccggaggtggtggatccgacgtccaactggtgcagtcaggggctgaagtgaaaaaacctggggcctcagtgaaggtgtcctgcaaggcttctggctacacctttactaggtacacgatgcactgggtaaggcaggcacctggacagggtctggaatggattggatacattaatcctagccgtggttatactaattacgcagacagcgtcaagggccgcttcacaatcactacagacaaatccaccagcacagcctacatggaactgagcagcctgcgttctgaggacactgcaacctattactgtgcaagatattatgatgatcattactgccttgactactggggccaaggcaccacggtcaccgtctcctcaggcgaaggtactagtactggttctggtggaagtggaggttcaggtggagcagacgacattcagatgacccagtctccatctagcctgtctgcatctgtcggggaccgtgtcaccatcacctgcagagccagtcaaagtgtaagttacatgaactggtaccagcagaagccgggcaaggcacccaaaagatggatttatgacacatccaaagtggcttctggagtccctgctcgcttcagtggcagtgggtctgggaccgactactctctcacaatcaacagcttggaggctgaagatgctgccacttattactgccaacagtggagtagtaacccgctcacgttcggtggcgggaccaaggtggagatcaaa

SEQ ID NO: 206 - protein, 492 aa, artificial sequence
  CCR5xanti-CD3 VH5VL1
DIILIQSPPSLAVSLGQRATISCRTSENVDGYGISFINWYQQKPGQPPKLLIYAASHQGSGVPARFSGSGSGTDFSLNIHPLEEDDTAMYFCHQSKKVPWTFGGGTKLEIKGGGGSGGGGSGGGGSQLEQSGPELKKPGETVTISCKASGYTFTKFGMNWVKQAPGKGLKWMGWIHTSTGEPTYSDDFKGRFAFSLETSASTAYLRINNLKNEDMAKYFCARGGPYVRGALDYWGQGTSVTVSSGGGGSDVQLVQSGAEVKKPGASVKVSCKASGYTFTRYTMHWVRQAPGQGLEWIGYINPSRGYTNYADSVKGRFTITTDKSTSTAYMELSSLRSEDTATYYCARYYDDHYCLDYWGQGTTVTVSSGEGTSTGSGGSGGSGGADDIQMTQSPSSLSASVGDRVTITCRASQSVSYMNWYQQKPGKAPKRWIYDTSKVASGVPARFSGSGSGTDYSLTINSLEAEDAATYYCQQWSSNPLTFGGGTKVEIK

SEQ ID NO: 207 - DNA, 1476 bp, artificial sequence
  CCR5xanti-CD3 VH5VL2
gacattatcctgatccaatctccaccttctttggctgtgtctctagggcagagggccaccatctcctgcagaaccagcgaaaatgttgacggatacggcattagttttataaactggtaccaacagaagccaggacagccacccaaactcctcatctatgctgcatcccaccaaggatccggggtccctgccagatttagtggcagtgggtctgggacagacttcagcctcaacatccatcctttggaggaggatgatactgcaatgtatttctgtcaccaaagtaagaaggttccgtggacgttcggtggaggcaccaagctggaaatcaaaggtggtggtggttctggcggcggcggctccggtggtggtggttctcagctggagcagtctggacctgaactgaagaagcctggagagacagtcacgatctcctgcaaggcttctgggtataccttcacgaagttcggaatgaactgggtgaagcaggctccaggaaagggtttaaagtggatgggctggatacacacctccactggagagccaacatattctgatgacttcaagggacggtttgccttctctttggaaacgtctgccagcactgcctatttgcggatcaacaacctcaaaaatgaggacatggctaaatacttctgtgccagaggtggtccttacgtaaggggtgctttggactactggggtcaaggaacctcagtcaccgtctcctccggaggtggtggatccgacgtccaactggtgcagtcaggggctgaagtgaaaaaacctggggcctcagtgaaggtgtcctgcaaggcttctggctacacctttactaggtacacgatgcactgggtaaggcaggcacctggacagggtctggaatggattggatacattaatcctagccgtggttatactaattacgcagacagcgtcaagggccgcttcacaatcactacagacaaatccaccagcacagcctacatggaactgagcagcctgcgttctgaggacactgcaacctattactgtgcaagatattatgatgatcattactgccttgactactggggccaaggcaccacggtcaccgtctcctcaggcgaaggtactagtactggttctggtggaagtggaggttcaggtggagcagacgacattgtactgacccagtctccagcaactctgtctctgtctccaggggagcgtgccaccctgagctgcagagccagtcaaagtgtaagttacatgaactggtaccagcagaagccgggcaaggcacccaaaagatggatttatgacacatccaaagtggcttctggagtccctgctcgcttcagtggcagtgggtctgggaccgactactctctcacaatcaacagcttggaggctgaagatgctgccacttattactgccaacagtggagtagtaacccgctcacgttcggtggcgggaccaaggtggagatcaaa

SEQ ID NO: 208 - protein, 492 aa, artificial sequence
  CCR5xanti-CD3 VH5VL2
DIILIQSPPSLAVSLGQRATISCRTSENVDGYGISFINWYQQKPGQPPKLLIYAASHQGSGVPARFSGSGSGTDFSLNIHPLEEDDTAMYFCHQSKKVPWTFGGGTKLEIKGGGGSGGGGSGGGGSQLEQSGPELKKPGETVTISCKASGYTFTKFGMNWVKQAPGKGLKWMGWIHTSTGEPTYSDDFKGRFAFSLETSASTAYLRINNLKNEDMAKYFCARGGPYVRGALDYWGQGTSVTVSSGGGGSDVQLVQSGAEVKKPGASVKVSCKASGYTFTRYTMHWVRQAPGQGLEWIGYINPSRGYTNYADSVKGRFTITTDKSTSTAYMELSSLRSEDTATYYCARYYDDHYCLDYWGQGTTVTVSSGEGTSTGSGGSGGSGGADDIVLTQSPATLSLSPGERATLSCRASQSVSYMNWYQQKPGKAPKRWIYDTSKVASGVPARFSGSGSGTDYSLTINSLEAEDAATYYCQQWSSNPLTFGGGTKVEIK

SEQ ID NO: 209 - DNA, 1476 bp, artificial sequence
  CCR5xanti-CD3 VH5VL3
gacattatcctgatccaatctccaccttctttggctgtgtctctagggcagagggccaccatctcctgcagaaccagcgaaaatgttgacggatacggcattagttttataaactggtaccaacagaagccaggacagccacccaaactcctcatctatgctgcatcccaccaaggatccggggtccctgccagatttagtggcagtgggtctgggacagacttcagcctcaacatccatcctttggaggaggatgatactgcaatgtatttctgtcaccaaagtaagaaggttccgtggacgttcggtggaggcaccaagctggaaatcaaaggtggtggtggttctggcggcggcggctccggtggtggtggttctcagctggagcagtctggacctgaactgaagaagcctggagagacagtcacgatctcctgcaaggcttctgggtataccttcacgaagttcggaatgaactgggtgaagcaggctccaggaaagggtttaaagtggatgggctggatacacacctccactggagagccaacatattctgatgacttcaagggacggtttgccttctctttggaaacgtctgccagcactgcctatttgcggatcaacaacctcaaaaatgaggacatggctaaatacttctgtgccagaggtggtccttacgtaaggggtgctttggactactggggtcaaggaacctcagtcaccgtctcctccggaggtggtggatccgacgtccaactggtgcagtcaggggctgaagtgaaaaaacctggggcctcagtgaaggtgtcctgcaaggcttctggctacacctttactaggtacacgatgcactgggtaaggcaggcacctggacagggtctggaatggattggatacattaatcctagccgtggttatactaattacgcagacagcgtcaagggccgcttcacaatcactacagacaaatccaccagcacagcctacatggaactgagcagcctgcgttctgaggacactgcaacctattactgtgcaagatattatgatgatcattactgccttgactactggggccaaggcaccacggtcaccgtctcctcaggcgaaggtactagtactggttctggtggaagtggaggttcaggtggagcagacgacattgtactgacccagtctccagcaactctgtctctgtctccaggggagcgtgccaccctgacctgcagagccagttcaagtgtaagttacatgaactggtaccagcagaagccgggcaaggcacccaaaagatggatttatgacacatccaaagtggcttctggagtccctgctcgcttcagtggcagtgggtctgggaccgactactctctcacaatcaacagcttggaggctgaagatgctgccacttattactgccaacagtggagtagtaacccgctcacgttcggtggcgggaccaaggtggagatcaaa

SEQ ID NO: 210 - protein, 492 aa, artificial sequence
  CCR5xanti-CD3 VH5VL3
DIILIQSPPSLAVSLGQRATISCRTSENVDGYGISFINWYQQKPGQPPKLLIYAASHQGSGVPARFSGSGSGTDFSLNIHPLEEDDTAMYFCHQSKKVPWTFGGGTKLEIKGGGGSGGGGSGGGGSQLEQSGPELKKPGETVTISCKASGYTFTKFGMNWVKQAPGKGLKWMGWIHTSTGEPTYSDDFKGRFAFSLETSASTAYLRINNLKNEDMAKYFCARGGPYVRGALDYWGQGTSVTVSSGGGGSDVQLVQSGAEVKKPGASVKVSCKASGYTFTRYTMHWVRQAPGQGLEWIGYINPSRGYTNYADSVKGRFTITTDKSTSTAYMELSSLRSEDTATYYCARYYDDHYCLDYWGQGTTVTVSSGEGTSTGSGGSGGSGGADDIVLTQSPATLSLSPGERATLTCRASSSVSYMNWYQQKPGKAPKRWIYDTSKVASGVPARFSGSGSGTDYSLTINSLEAEDAATYYCQQWSSNPLTFGGGTKVEIK

SEQ ID NO: 211 - DNA, 1476 bp, artificial sequence
  CCR5xanti-CD3 VH7VL1
gacattatcctgatccaatctccaccttctttggctgtgtctctagggcagagggccaccatctcctgcagaaccagcgaaaatgttgacggatacggcattagttttataaactggtaccaacagaagccaggacagccacccaaactcctcatctatgctgcatcccaccaaggatccggggtccctgccagatttagtggcagtgggtctgggacagacttcagcctcaacatccatcctttggaggaggatgatactgcaatgtatttctgtcaccaaagtaagaaggttccgtggacgttcggtggaggcaccaagctggaaatcaaaggtggtggtggttctggcggcggcggctccggtggtggtggttctcagctggagcagtctggacctgaactgaagaagcctggagagacagtcacgatctcctgcaaggcttctgggtataccttcacgaagttcggaatgaactgggtgaagcaggctccaggaaagggtttaaagtggatgggctggatacacacctccactggagagccaacatattctgatgacttcaagggacggtttgccttctctttggaaacgtctgccagcactgcctatttgcggatcaacaacctcaaaaatgaggacatggctaaatacttctgtgccagaggtggtccttacgtaaggggtgctttggactactggggtcaaggaacctcagtcaccgtctcctccggaggtggtggatccgacgtccaactggtgcagtcaggggctgaagtgaaaaaacctggggcctcagtgaaggtgtcctgcaaggcttctggctacacctttactaggtacacgatgcactgggtaaggcaggcacctggacagggtctggaatggattggatacattaatcctagccgtggttatactaattacaatcagaagttcaaggaccgcgtcacaatcactacagacaaatccaccagcacagcctacatggaactgagcagcctgcgttctgaggacactgcagtctattactgtgcaagatattatgatgatcattactgccttgactactggggccaaggcaccacggtcaccgtctcctcaggcgaaggtactagtactggttctggtggaagtggaggttcaggtggagcagacgacattcagatgacccagtctccatctagcctgtctgcatctgtcggggaccgtgtcaccatcacctgcagagccagtcaaagtgtaagttacatgaactggtaccagcagaagccgggcaaggcacccaaaagatggatttatgacacatccaaagtggcttctggagtccctgctcgcttcagtggcagtgggtctgggaccgactactctctcacaatcaacagcttggaggctgaagatgctgccacttattactgccaacagtggagtagtaacccgctcacgttcggtggcgggaccaaggtggagatcaaa

SEQ ID NO: 212 - protein, 492 aa, artificial sequence
  CCR5xanti-CD3 VH7VL1
DIILIQSPPSLAVSLGQRATISCRTSENVDGYGISFINWYQQKPGQPPKLLIYAASHQGSGVPARFSGSGSGTDFSLNIHPLEEDDTAMYFCHQSKKVPWTFGGGTKLEIKGGGGSGGGGSGGGGSQLEQSGPELKKPGETVTISCKASGYTFTKFGMNWVKQAPGKGLKWMGWIHTSTGEPTYSDDFKGRFAFSLETSASTAYLRINNLKNEDMAKYFCARGGPYVRGALDYWGQGTSVTVSSGGGGSDVQLVQSGAEVKKPGASVKVSCKASGYTFTRYTMHWVRQAPGQGLEWIGYINPSRGYTNYNQKFKDRVTITTDKSTSTAYMELSSLRSEDTAVYYCARYYDDHYCLDYWGQGTTVTVSSGEGTSTGSGGSGGSGGADDIQMTQSPSSLSASVGDRVTITCRASQSVSYMNWYQQKPGKAPKRWIYDTSKVASGVPARFSGSGSGTDYSLTINSLEAEDAATYYCQQWSSNPLTFGGGTKVEIK

SEQ ID NO: 213 - DNA, 1476 bp, artificial sequence
  CCR5xanti-CD3 VH7VL2
gacattatcctgatccaatctccaccttctttggctgtgtctctagggcagagggccaccatctcctgcagaaccagcgaaaatgttgacggatacggcattagttttataaactggtaccaacagaagccaggacagccacccaaactcctcatctatgctgcatcccaccaaggatccggggtccctgccagatttagtggcagtgggtctgggacagacttcagcctcaacatccatcctttggaggaggatgatactgcaatgtatttctgtcaccaaagtaagaaggttccgtggacgttcggtggaggcaccaagctggaaatcaaaggtggtggtggttctggcggcggcggctccggtggtggtggttctcagctggagcagtctggacctgaactgaagaagcctggagagacagtcacgatctcctgcaaggcttctgggtataccttcacgaagttcggaatgaactgggtgaagcaggctccaggaaagggtttaaagtggatgggctggatacacacctccactggagagccaacatattctgatgacttcaagggacggtttgccttctctttggaaacgtctgccagcactgcctatttgcggatcaacaacctcaaaaatgaggacatggctaaatacttctgtgccagaggtggtccttacgtaaggggtgctttggactactggggtcaaggaacctcagtcaccgtctcctccggaggtggtggatccgacgtccaactggtgcagtcaggggctgaagtgaaaaaacctggggcctcagtgaaggtgtcctgcaaggcttctggctacacctttactaggtacacgatgcactgggtaaggcaggcacctggacagggtctggaatggattggatacattaatcctagccgtggttatactaattacaatcagaagttcaaggaccgcgtcacaatcactacagacaaatccaccagcacagcctacatggaactgagcagcctgcgttctgaggacactgcagtctattactgtgcaagatattatgatgatcattactgccttgactactggggccaaggcaccacggtcaccgtctcctcaggcgaaggtactagtactggttctggtggaagtggaggttcaggtggagcagacgacattgtactgacccagtctccagcaactctgtctctgtctccaggggagcgtgccaccctgagctgcagagccagtcaaagtgtaagttacatgaactggtaccagcagaagccgggcaaggcacccaaaagatggatttatgacacatccaaagtggcttctggagtccctgctcgcttcagtggcagtgggtctgggaccgactactctctcacaatcaacagcttggaggctgaagatgctgccacttattactgccaacagtggagtagtaacccgctcacgttcggtggcgggaccaaggtggagatcaaa

SEQ ID NO: 214 - protein, 492 aa, artificial sequence
  CCR5xanti-CD3 VH7VL2
DIILIQSPPSLAVSLGQRATISCRTSENVDGYGISFINWYQQKPGQPPKLLIYAASHQGSGVPARFSGSGSGTDFSLNIHPLEEDDTAMYFCHQSKKVPWTFGGGTKLEIKGGGGSGGGGSGGGGSQLEQSGPELKKPGETVTISCKASGYTFTKFGMNWVKQAPGKGLKWMGWIHTSTGEPTYSDDFKGRFAFSLETSASTAYLRINNLKNEDMAKYFCARGGPYVRGALDYWGQGTSVTVSSGGGGSDVQLVQSGAEVKKPGASVKVSCKASGYTFTRYTMHWVRQAPGQGLEWIGYINPSRGYTNYNQKFKDRVTITTDKSTSTAYMELSSLRSEDTAVYYCARYYDDHYCLDYWGQGTTVTVSSGEGTSTGSGGSGGSGGADDIVLTQSPATLSLSPGERATLSCRASQSVSYMNWYQQKPGKAPKRWIYDTSKVASGVPARFSGSGSGTDYSLTINSLEAEDAATYYCQQWSSNPLTFGGGTKVEIK

SEQ ID NO: 215 - DNA, 1476 bp, artificial sequence
  CCR5xanti-CD3 VH7VL3
gacattatcctgatccaatctccaccttctttggctgtgtctctagggcagagggccaccatctcctgcagaaccagcgaaaatgttgacggatacggcattagttttataaactggtaccaacagaagccaggacagccacccaaactcctcatctatgctgcatcccaccaaggatccggggtccctgccagatttagtggcagtgggtctgggacagacttcagcctcaacatccatcctttggaggaggatgatactgcaatgtatttctgtcaccaaagtaagaaggttccgtggacgttcggtggaggcaccaagctggaaatcaaaggtggtggtggttctggcggcggcggctccggtggtggtggttctcagctggagcagtctggacctgaactgaagaagcctggagagacagtcacgatctcctgcaaggcttctgggtataccttcacgaagttcggaatgaactgggtgaagcaggctccaggaaagggtttaaagtggatgggctggatacacacctccactggagagccaacatattctgatgacttcaagggacggtttgccttctctttggaaacgtctgccagcactgcctatttgcggatcaacaacctcaaaaatgaggacatggctaaatacttctgtgccagaggtggtccttacgtaaggggtgctttggactactggggtcaaggaacctcagtcaccgtctcctccggaggtggtggatccgacgtccaactggtgcagtcaggggctgaagtgaaaaaacctggggcctcagtgaaggtgtcctgcaaggcttctggctacacctttactaggtacacgatgcactgggtaaggcaggcacctggacagggtctggaatggattggatacattaatcctagccgtggttatactaattacaatcagaagttcaaggaccgcgtcacaatcactacagacaaatccaccagcacagcctacatggaactgagcagcctgcgttctgaggacactgcagtctattactgtgcaagatattatgatgatcattactgccttgactactggggccaaggcaccacggtcaccgtctcctcaggcgaaggtactagtactggttctggtggaagtggaggttcaggtggagcagacgacattgtactgacccagtctccagcaactctgtctctgtctccaggggagcgtgccaccctgacctgcagagccagttcaagtgtaagttacatgaactggtaccagcagaagccgggcaaggcacccaaaagatggatttatgacacatccaaagtggcttctggagtccctgctcgcttcagtggcagtgggtctgggaccgactactctctcacaatcaacagcttggaggctgaagatgctgccacttattactgccaacagtggagtagtaacccgctcacgttcggtggcgggaccaaggtggagatcaaa

SEQ ID NO: 216 - protein, 492 aa, artificial sequence
  CCR5xanti-CD3 VH7VL3
DIILIQSPPSLAVSLGQRATISCRTSENVDGYGISFINWYQQKPGQPPKLLIYAASHQGSGVPARFSGSGSGTDFSLNIHPLEEDDTAMYFCHQSKKVPWTFGGGTKLEIKGGGGSGGGGSGGGGSQLEQSGPELKKPGETVTISCKASGYTFTKFGMNWVKQAPGKGLKWMGWIHTSTGEPTYSDDFKGRFAFSLETSASTAYLRINNLKNEDMAKYFCARGGPYVRGALDYWGQGTSVTVSSGGGGSDVQLVQSGAEVKKPGASVKVSCKASGYTFTRYTMHWVRQAPGQGLEWIGYINPSRGYTNYNQKFKDRVTITTDKSTSTAYMELSSLRSEDTAVYYCARYYDDHYCLDYWGQGTTVTVSSGEGTSTGSGGSGGSGGADDIVLTQSPATLSLSPGERATLTCRASSSVSYMNWYQQKPGKAPKRWIYDTSKVASGVPARFSGSGSGTDYSLTINSLEAEDAATYYCQQWSSNPLTFGGGTKVEIK

SEQ ID NO: 217 - DNA, 1473 bp, artificial sequence
  CD20xanti-CD3 VH5VL1
caaattgttctctcccagtctccagcaatcctttctgcatctccaggggagaaggtcacaatgacttgcagggccagctcaagtttaagtttcatgcactggtaccagcagaagccaggatcctcccccaaaccctggatttatgccacatccaacctggcttctggagtccctgctcgcttcagtggcagtgggtctgggacctcttactctctcacaatcagcagagtggaggctgaagatgctgccacttatttctgccatcagtggagtagtaacccgctcacgttcggtgctgggacaaaggtggaaataaaaggtggtggtggttctggcggcggcggctccggtggtggtggttctcaggtgcaactgcggcagcctggggctgagctggtgaagcctggggcctcagtgaagatgtcctgcaaggcttctggctacacatttaccagttacaatatgcactgggtaaagcagacacctggacagggcctggaatggattggagctatttatccaggaaatggtgatacttcctacaatcagaagttcaaaggcaaggccacattgactgcagacaaatcctccagcacagcctacatgcagctcagcagtctgacatctgaggactctgcggtctattactgtgcaagatcgcactacggtagtaactacgtagactactttgactactggggccaaggcacactagtcacagtctcgacaggaggtggtggatccgacgtccaactggtgcagtcaggggctgaagtgaaaaaacctggggcctcagtgaaggtgtcctgcaaggcttctggctacacctttactaggtacacgatgcactgggtaaggcaggcacctggacagggtctggaatggattggatacattaatcctagccgtggttatactaattacgcagacagcgtcaagggccgcttcacaatcactacagacaaatccaccagcacagcctacatggaactgagcagcctgcgttctgaggacactgcaacctattactgtgcaagatattatgatgatcattactgccttgactactggggccaaggcaccacggtcaccgtctcctcaggcgaaggtactagtactggttctggtggaagtggaggttcaggtggagcagacgacattcagatgacccagtctccatctagcctgtctgcatctgtcggggaccgtgtcaccatcacctgcagagccagtcaaagtgtaagttacatgaactggtaccagcagaagccgggcaaggcacccaaaagatggatttatgacacatccaaagtggcttctggagtccctgctcgcttcagtggcagtgggtctgggaccgactactctctcacaatcaacagcttggaggctgaagatgctgccacttattactgccaacagtggagtagtaacccgctcacgttcggtggcgggaccaaggtggagatcaaa

SEQ ID NO: 218 - protein, 491 aa, artificial sequence
  CD20xanti-CD3 VH5VL1
QIVLSQSPAILSASPGEKVTMTCRASSSLSFMHWYQQKPGSSPKPWIYATSNLASGVPARFSGSGSGTSYSLTISRVEAEDAATYFCHQWSSNPLTFGAGTKVEIKGGGGSGGGGSGGGGSQVQLRQPGAELVKPGASVKMSCKASGYTFTSYNMHWVKQTPGQGLEWIGAIYPGNGDTSYNQKFKGKATLTADKSSSTAYMQLSSLTSEDSAVYYCARSHYGSNYVDYFDYWGQGTLVTVSTGGGGSDVQLVQSGAEVKKPGASVKVSCKASGYTFTRYTMHWVRQAPGQGLEWIGYINPSRGYTNYADSVKGRFTITTDKSTSTAYMELSSLRSEDTATYYCARYYDDHYCLDYWGQGTTVTVSSGEGTSTGSGGSGGSGGADDIQMTQSPSSLSASVGDRVTITCRASQSVSYMNWYQQKPGKAPKRWIYDTSKVASGVPARFSGSGSGTDYSLTINSLEAEDAATYYCQQWSSNPLTFGGGTKVEIK

SEQ ID NO: 219 - DNA, 1473 bp, artificial sequence
  CD20xanti-CD3 VH5VL2
caaattgttctctcccagtctccagcaatcctttctgcatctccaggggagaaggtcacaatgacttgcagggccagctcaagtttaagtttcatgcactggtaccagcagaagccaggatcctcccccaaaccctggatttatgccacatccaacctggcttctggagtccctgctcgcttcagtggcagtgggtctgggacctcttactctctcacaatcagcagagtggaggctgaagatgctgccacttatttctgccatcagtggagtagtaacccgctcacgttcggtgctgggacaaaggtggaaataaaaggtggtggtggttctggcggcggcggctccggtggtggtggttctcaggtgcaactgcggcagcctggggctgagctggtgaagcctggggcctcagtgaagatgtcctgcaaggcttctggctacacatttaccagttacaatatgcactgggtaaagcagacacctggacagggcctggaatggattggagctatttatccaggaaatggtgatacttcctacaatcagaagttcaaaggcaaggccacattgactgcagacaaatcctccagcacagcctacatgcagctcagcagtctgacatctgaggactctgcggtctattactgtgcaagatcgcactacggtagtaactacgtagactactttgactactggggccaaggcacactagtcacagtctcgacaggaggtggtggatccgacgtccaactggtgcagtcaggggctgaagtgaaaaaacctggggcctcagtgaaggtgtcctgcaaggcttctggctacacctttactaggtacacgatgcactgggtaaggcaggcacctggacagggtctggaatggattggatacattaatcctagccgtggttatactaattacgcagacagcgtcaagggccgcttcacaatcactacagacaaatccaccagcacagcctacatggaactgagcagcctgcgttctgaggacactgcaacctattactgtgcaagatattatgatgatcattactgccttgactactggggccaaggcaccacggtcaccgtctcctcaggcgaaggtactagtactggttctggtggaagtggaggttcaggtggagcagacgacattgtactgacccagtctccagcaactctgtctctgtctccaggggagcgtgccaccctgagctgcagagccagtcaaagtgtaagttacatgaactggtaccagcagaagccgggcaaggcacccaaaagatggatttatgacacatccaaagtggcttctggagtccctgctcgcttcagtggcagtgggtctgggaccgactactctctcacaatcaacagcttggaggctgaagatgctgccacttattactgccaacagtggagtagtaacccgctcacgttcggtggcgggaccaaggtggagatcaaa

SEQ ID NO: 220 - protein, 491 aa, artificial sequence
  CD20xanti-CD3 VH5VL2
QIVLSQSPAILSASPGEKVTMTCRASSSLSFMHWYQQKPGSSPKPWIYATSNLASGVPARFSGSGSGTSYSLTISRVEAEDAATYFCHQWSSNPLTFGAGTKVEIKGGGGSGGGGSGGGGSQVQLRQPGAELVKPGASVKMSCKASGYTFTSYNMHWVKQTPGQGLEWIGAIYPGNGDTSYNQKFKGKATLTADKSSSTAYMQLSSLTSEDSAVYYCARSHYGSNYVDYFDYWGQGTLVTVSTGGGGSDVQLVQSGAEVKKPGASVKVSCKASGYTFTRYTMHWVRQAPGQGLEWIGYINPSRGYTNYADSVKGRFTITTDKSTSTAYMELSSLRSEDTATYYCARYYDDHYCLDYWGQGTTVTVSSGEGTSTGSGGSGGSGGADDIVLTQSPATLSLSPGERATLSCRASQSVSYMNWYQQKPGKAPKRWIYDTSKVASGVPARFSGSGSGTDYSLTINSLEAEDAATYYCQQWSSNPLTFGGGTKVEIK

SEQ ID NO: 221 - DNA, 1473 bp, artificial sequence
  CD20xanti-CD3 VH5VL3
caaattgttctctcccagtctccagcaatcctttctgcatctccaggggagaaggtcacaatgacttgcagggccagctcaagtttaagtttcatgcactggtaccagcagaagccaggatcctcccccaaaccctggatttatgccacatccaacctggcttctggagtccctgctcgcttcagtggcagtgggtctgggacctcttactctctcacaatcagcagagtggaggctgaagatgctgccacttatttctgccatcagtggagtagtaacccgctcacgttcggtgctgggacaaaggtggaaataaaaggtggtggtggttctggcggcggcggctccggtggtggtggttctcaggtgcaactgcggcagcctggggctgagctggtgaagcctggggcctcagtgaagatgtcctgcaaggcttctggctacacatttaccagttacaatatgcactgggtaaagcagacacctggacagggcctggaatggattggagctatttatccaggaaatggtgatacttcctacaatcagaagttcaaaggcaaggccacattgactgcagacaaatcctccagcacagcctacatgcagctcagcagtctgacatctgaggactctgcggtctattactgtgcaagatcgcactacggtagtaactacgtagactactttgactactggggccaaggcacactagtcacagtctcgacaggaggtggtggatccgacgtccaactggtgcagtcaggggctgaagtgaaaaaacctggggcctcagtgaaggtgtcctgcaaggcttctggctacacctttactaggtacacgatgcactgggtaaggcaggcacctggacagggtctggaatggattggatacattaatcctagccgtggttatactaattacgcagacagcgtcaagggccgcttcacaatcactacagacaaatccaccagcacagcctacatggaactgagcagcctgcgttctgaggacactgcaacctattactgtgcaagatattatgatgatcattactgccttgactactggggccaaggcaccacggtcaccgtctcctcaggcgaaggtactagtactggttctggtggaagtggaggttcaggtggagcagacgacattgtactgacccagtctccagcaactctgtctctgtctccaggggagcgtgccaccctgacctgcagagccagttcaagtgtaagttacatgaactggtaccagcagaagccgggcaaggcacccaaaagatggatttatgacacatccaaagtggcttctggagtccctgctcgcttcagtggcagtgggtctgggaccgactactctctcacaatcaacagcttggaggctgaagatgctgccacttattactgccaacagtggagtagtaacccgctcacgttcggtggcgggaccaaggtggagatcaaa

SEQ ID NO: 222 - protein, 491 aa, artificial sequence
  CD20xanti-CD3 VH5VL3
QIVLSQSPAILSASPGEKVTMTCRASSSLSFMHWYQQKPGSSPKPWIYATSNLASGVPARFSGSGSGTSYSLTISRVEAEDAATYFCHQWSSNPLTFGAGTKVEIKGGGGSGGGGSGGGGSQVQLRQPGAELVKPGASVKMSCKASGYTFTSYNMHWVKQTPGQGLEWIGAIYPGNGDTSYNQKFKGKATLTADKSSSTAYMQLSSLTSEDSAVYYCARSHYGSNYVDYFDYWGQGTLVTVSTGGGGSDVQLVQSGAEVKKPGASVKVSCKASGYTFTRYTMHWVRQAPGQGLEWIGYINPSRGYTNYADSVKGRFTITTDKSTSTAYMELSSLRSEDTATYYCARYYDDHYCLDYWGQGTTVTVSSGEGTSTGSGGSGGSGGADDIVLTQSPATLSLSPGERATLTCRASSSVSYMNWYQQKPGKAPKRWIYDTSKVASGVPARFSGSGSGTDYSLTINSLEAEDAATYYCQQWSSNPLTFGGGTKVEIK

SEQ ID NO: 223 - DNA, 1473 bp, artificial sequence
  CD20xanti-CD3 VH7VL1
caaattgttctctcccagtctccagcaatcctttctgcatctccaggggagaaggtcacaatgacttgcagggccagctcaagtttaagtttcatgcactggtaccagcagaagccaggatcctcccccaaaccctggatttatgccacatccaacctggcttctggagtccctgctcgcttcagtggcagtgggtctgggacctcttactctctcacaatcagcagagtggaggctgaagatgctgccacttatttctgccatcagtggagtagtaacccgctcacgttcggtgctgggacaaaggtggaaataaaaggtggtggtggttctggcggcggcggctccggtggtggtggttctcaggtgcaactgcggcagcctggggctgagctggtgaagcctggggcctcagtgaagatgtcctgcaaggcttctggctacacatttaccagttacaatatgcactgggtaaagcagacacctggacagggcctggaatggattggagctatttatccaggaaatggtgatacttcctacaatcagaagttcaaaggcaaggccacattgactgcagacaaatcctccagcacagcctacatgcagctcagcagtctgacatctgaggactctgcggtctattactgtgcaagatcgcactacggtagtaactacgtagactactttgactactggggccaaggcacactagtcacagtctcgacaggaggtggtggatccgacgtccaactggtgcagtcaggggctgaagtgaaaaaacctggggcctcagtgaaggtgtcctgcaaggcttctggctacacctttactaggtacacgatgcactgggtaaggcaggcacctggacagggtctggaatggattggatacattaatcctagccgtggttatactaattacaatcagaagttcaaggaccgcgtcacaatcactacagacaaatccaccagcacagcctacatggaactgagcagcctgcgttctgaggacactgcagtctattactgtgcaagatattatgatgatcattactgccttgactactggggccaaggcaccacggtcaccgtctcctcaggcgaaggtactagtactggttctggtggaagtggaggttcaggtggagcagacgacattcagatgacccagtctccatctagcctgtctgcatctgtcggggaccgtgtcaccatcacctgcagagccagtcaaagtgtaagttacatgaactggtaccagcagaagccgggcaaggcacccaaaagatggatttatgacacatccaaagtggcttctggagtccctgctcgcttcagtggcagtgggtctgggaccgactactctctcacaatcaacagcttggaggctgaagatgctgccacttattactgccaacagtggagtagtaacccgctcacgttcggtggcgggaccaaggtggagatcaaa

SEQ ID NO: 224 - protein, 491 aa, artificial sequence
  CD20xanti-CD3 VH7VL1
QIVLSQSPAILSASPGEKVTMTCRASSSLSFMHWYQQKPGSSPKPWIYATSNLASGVPARFSGSGSGTSYSLTISRVEAEDAATYFCHQWSSNPLTFGAGTKVEIKGGGGSGGGGSGGGGSQVQLRQPGAELVKPGASVKMSCKASGYTFTSYNMHWVKQTPGQGLEWIGAIYPGNGDTSYNQKFKGKATLTADKSSSTAYMQLSSLTSEDSAVYYCARSHYGSNYVDYFDYWGQGTLVTVSTGGGGSDVQLVQSGAEVKKPGASVKVSCKASGYTFTRYTMHWVRQAPGQGLEWIGYINPSRGYTNYNQKFKDRVTITTDKSTSTAYMELSSLRSEDTAVYYCARYYDDHYCLDYWGQGTTVTVSSGEGTSTGSGGSGGSGGADDIQMTQSPSSLSASVGDRVTITCRASQSVSYMNWYQQKPGKAPKRWIYDTSKVASGVPARFSGSGSGTDYSLTINSLEAEDAATYYCQQWSSNPLTFGGGTKVEIK

SEQ ID NO: 225 - DNA, 1473 bp, artificial sequence
  CD20xanti-CD3 VH7VL2
caaattgttctctcccagtctccagcaatcctttctgcatctccaggggagaaggtcacaatgacttgcagggccagctcaagtttaagtttcatgcactggtaccagcagaagccaggatcctcccccaaaccctggatttatgccacatccaacctggcttctggagtccctgctcgcttcagtggcagtgggtctgggacctcttactctctcacaatcagcagagtggaggctgaagatgctgccacttatttctgccatcagtggagtagtaacccgctcacgttcggtgctgggacaaaggtggaaataaaaggtggtggtggttctggcggcggcggctccggtggtggtggttctcaggtgcaactgcggcagcctggggctgagctggtgaagcctggggcctcagtgaagatgtcctgcaaggcttctggctacacatttaccagttacaatatgcactgggtaaagcagacacctggacagggcctggaatggattggagctatttatccaggaaatggtgatacttcctacaatcagaagttcaaaggcaaggccacattgactgcagacaaatcctccagcacagcctacatgcagctcagcagtctgacatctgaggactctgcggtctattactgtgcaagatcgcactacggtagtaactacgtagactactttgactactggggccaaggcacactagtcacagtctcgacaggaggtggtggatccgacgtccaactggtgcagtcaggggctgaagtgaaaaaacctggggcctcagtgaaggtgtcctgcaaggcttctggctacacctttactaggtacacgatgcactgggtaaggcaggcacctggacagggtctggaatggattggatacattaatcctagccgtggttatactaattacaatcagaagttcaaggaccgcgtcacaatcactacagacaaatccaccagcacagcctacatggaactgagcagcctgcgttctgaggacactgcagtctattactgtgcaagatattatgatgatcattactgccttgactactggggccaaggcaccacggtcaccgtctcctcaggcgaaggtactagtactggttctggtggaagtggaggttcaggtggagcagacgacattgtactgacccagtctccagcaactctgtctctgtctccaggggagcgtgccaccctgagctgcagagccagtcaaagtgtaagttacatgaactggtaccagcagaagccgggcaaggcacccaaaagatggatttatgacacatccaaagtggcttctggagtccctgctcgcttcagtggcagtgggtctgggaccgactactctctcacaatcaacagcttggaggctgaagatgctgccacttattactgccaacagtggagtagtaacccgctcacgttcggtggcgggaccaaggtggagatcaaa

SEQ ID NO: 226 - protein, 491 aa, artificial sequence
  CD20xanti-CD3 VH7VL2
QIVLSQSPAILSASPGEKVTMTCRASSSLSFMHWYQQKPGSSPKPWIYATSNLASGVPARFSGSGSGTSYSLTISRVEAEDAATYFCHQWSSNPLTFGAGTKVEIKGGGGSGGGGSGGGGSQVQLRQPGAELVKPGASVKMSCKASGYTFTSYNMHWVKQTPGQGLEWIGAIYPGNGDTSYNQKFKGKATLTADKSSSTAYMQLSSLTSEDSAVYYCARSHYGSNYVDYFDYWGQGTLVTVSTGGGGSDVQLVQSGAEVKKPGASVKVSCKASGYTFTRYTMHWVRQAPGQGLEWIGYINPSRGYTNYNQKFKDRVTITTDKSTSTAYMELSSLRSEDTAVYYCARYYDDHYCLDYWGQGTTVTVSSGEGTSTGSGGSGGSGGADDIVLTQSPATLSLSPGERATLSCRASQSVSYMNWYQQKPGKAPKRWIYDTSKVASGVPARFSGSGSGTDYSLTINSLEAEDAATYYCQQWSSNPLTFGGGTKVEIK

SEQ ID NO: 227 - DNA, 1473 bp, artificial sequence
  CD20xanti-CD3 VH7VL3
caaattgttctctcccagtctccagcaatcctttctgcatctccaggggagaaggtcacaatgacttgcagggccagctcaagtttaagtttcatgcactggtaccagcagaagccaggatcctcccccaaaccctggatttatgccacatccaacctggcttctggagtccctgctcgcttcagtggcagtgggtctgggacctcttactctctcacaatcagcagagtggaggctgaagatgctgccacttatttctgccatcagtggagtagtaacccgctcacgttcggtgctgggacaaaggtggaaataaaaggtggtggtggttctggcggcggcggctccggtggtggtggttctcaggtgcaactgcggcagcctggggctgagctggtgaagcctggggcctcagtgaagatgtcctgcaaggcttctggctacacatttaccagttacaatatgcactgggtaaagcagacacctggacagggcctggaatggattggagctatttatccaggaaatggtgatacttcctacaatcagaagttcaaaggcaaggccacattgactgcagacaaatcctccagcacagcctacatgcagctcagcagtctgacatctgaggactctgcggtctattactgtgcaagatcgcactacggtagtaactacgtagactactttgactactggggccaaggcacactagtcacagtctcgacaggaggtggtggatccgacgtccaactggtgcagtcaggggctgaagtgaaaaaacctggggcctcagtgaaggtgtcctgcaaggcttctggctacacctttactaggtacacgatgcactgggtaaggcaggcacctggacagggtctggaatggattggatacattaatcctagccgtggttatactaattacaatcagaagttcaaggaccgcgtcacaatcactacagacaaatccaccagcacagcctacatggaactgagcagcctgcgttctgaggacactgcagtctattactgtgcaagatattatgatgatcattactgccttgactactggggccaaggcaccacggtcaccgtctcctcaggcgaaggtactagtactggttctggtggaagtggaggttcaggtggagcagacgacattgtactgacccagtctccagcaactctgtctctgtctccaggggagcgtgccaccctgacctgcagagccagttcaagtgtaagttacatgaactggtaccagcagaagccgggcaaggcacccaaaagatggatttatgacacatccaaagtggcttctggagtccctgctcgcttcagtggcagtgggtctgggaccgactactctctcacaatcaacagcttggaggctgaagatgctgccacttattactgccaacagtggagtagtaacccgctcacgttcggtggcgggaccaaggtggagatcaaa

SEQ ID NO: 228 - protein, 491 aa, artificial sequence
  CD20xanti-CD3 VH7VL3
QIVLSQSPAILSASPGEKVTMTCRASSSLSFMHWYQQKPGSSPKPWIYATSNLASGVPARFSGSGSGTSYSLTISRVEAEDAATYFCHQWSSNPLTFGAGTKVEIKGGGGSGGGGSGGGGSQVQLRQPGAELVKPGASVKMSCKASGYTFTSYNMHWVKQTPGQGLEWIGAIYPGNGDTSYNQKFKGKATLTADKSSSTAYMQLSSLTSEDSAVYYCARSHYGSNYVDYFDYWGQGTLVTVSTGGGGSDVQLVQSGAEVKKPGASVKVSCKASGYTFTRYTMHWVRQAPGQGLEWIGYINPSRGYTNYNQKFKDRVTITTDKSTSTAYMELSSLRSEDTAVYYCARYYDDHYCLDYWGQGTTVTVSSGEGTSTGSGGSGGSGGADDIVLTQSPATLSLSPGERATLTCRASSSVSYMNWYQQKPGKAPKRWIYDTSKVASGVPARFSGSGSGTDYSLTINSLEAEDAATYYCQQWSSNPLTFGGGTKVEIK

SEQ ID NO: 229 - protein, 25 aa, artificial sequence
  non-deimmunized anti-CD3 Framework 1
DIKLQQSGAELARPGASVKMSCKTS

SEQ ID NO: 230 - protein, 15 aa, artificial sequence
  non-deimmunized anti-CD3 Framework 2
WVKQRPGQGLEWIGY

SEQ ID NO: 231 - protein, 32 aa, artificial sequence
  non-deimmunized anti-CD3 Framework 3
KATLTTDKSSSTAYMQLSSLTSEDSAVYYCAR

SEQ ID NO: 232 - protein, 11 aa, artificial sequence
  non-deimmunized anti-CD3 Framework 4
WGQGTTLTVSS

SEQ ID NO: 233 - protein, 6 aa, artificial sequence
  Sequence motif
ASGYTF

SEQ ID NO: 234 - protein, 4 aa, artificial sequence
  Sequence motif
MELS

SEQ ID NO: 235 - protein, 5 aa, artificial sequence
  Sequence motif
ITTDK

SEQ ID NO: 236 - DNA, 1488 bp, artificial sequence
  5-10xVH5VL1 LHHL
gagctcgtgatgacacagtctccatcctccctgactgtgacagcaggagagaaggtcactatgagctgcaagtccagtcagagtctgttaaacagtggaaatcaaaagaactacttgacctggtaccagcagaaaccagggcagcctcctaaactgttgatctactgggcatccactagggaatctggggtccctgatcgcttcacaggcagtggatctggaacagatttcactctcaccatcagcagtgtgcaggctgaagacctggcagtttattactgtcagaatgattatagttatccgctcacgttcggtgctgggaccaagcttgagatcaaaggtggtggtggttctggcggcggcggctccggtggtggtggttctgaggtgcagctgctcgagcagtctggagctgagctggtaaggcctgggacttcagtgaagatatcctgcaaggcttctggatacgccttcactaactactggctaggttgggtaaagcagaggcctggacatggacttgagtggattggagatattttccctggaagtggtaatatccactacaatgagaagttcaagggcaaagccacactgactgcagacaaatcttcgagcacagcctatatgcagctcagtagcctgacatttgaggactctgctgtctatttctgtgcaagactgaggaactgggacgagcctatggactactggggccaagggaccacggtcaccgtctcctccggaggtggtggatccgacgtccaactggtgcagtcaggggctgaagtgaaaaaacctggggcctcagtgaaggtgtcctgcaaggcttctggctacacctttactaggtacacgatgcactgggtaaggcaggcacctggacagggtctggaatggattggatacattaatcctagccgtggttatactaattacgcagacagcgtcaagggccgcttcacaatcactacagacaaatccaccagcacagcctacatggaactgagcagcctgcgttctgaggacactgcaacctattactgtgcaagatattatgatgatcattactgccttgactactggggccaaggcaccacggtcaccgtctcctcaggcgaaggtactagtactggttctggtggaagtggaggttcaggtggagcagacgacattcagatgacccagtctccatctagcctgtctgcatctgtcggggaccgtgtcaccatcacctgcagagccagtcaaagtgtaagttacatgaactggtaccagcagaagccgggcaaggcacccaaaagatggatttatgacacatccaaagtggcttctggagtccctgctcgcttcagtggcagtgggtctgggaccgactactctctcacaatcaacagcttggaggctgaagatgctgccacttattactgccaacagtggagtagtaacccgctcacgttcggtggcgggaccaaggtggagatcaaa

SEQ ID NO: 237 - protein, 496 aa, artificial sequence
  5-10xVH5VL1 LHHL
ELVMTQSPSSLTVTAGEKVTMSCKSSQSLLNSGNQKNYLTWYQQKPGQPPKLLIYWASTRESGVPDRFTGSGSGTDFTLTISSVQAEDLAVYYCQNDYSYPLTFGAGTKLEIKGGGGSGGGGSGGGGSEVQLLEQSGAELVRPGTSVKISCKASGYAFTNYWLGWVKQRPGHGLEWIGDIFPGSGNIHYNEKFKGKATLTADKSSSTAYMQLSSLTFEDSAVYFCARLRNWDEPMDYWGQGTTVTVSSGGGGSDVQLVQSGAEVKKPGASVKVSCKASGYTFTRYTMHWVRQAPGQGLEWIGYINPSRGYTNYADSVKGRFTITTDKSTSTAYMELSSLRSEDTATYYCARYYDDHYCLDYWGQGTTVTVSSGEGTSTGSGGSGGSGGADDIQMTQSPSSLSASVGDRVTITCRASQSVSYMNWYQQKPGKAPKRWIYDTSKVASGVPARFSGSGSGTDYSLTINSLEAEDAATYYCQQWSSNPLTFGGGTKVEIK

SEQ ID NO: 238 - DNA, 1491 bp, artificial sequence
  5-10xVH5VL1 HLHL
gaggtgcagctgctcgagcagtctggagctgagctggtaaggcctgggacttcagtgaagatatcctgcaaggcttctggatacgccttcactaactactggctaggttgggtaaagcagaggcctggacatggacttgagtggattggagatattttccctggaagtggtaatatccactacaatgagaagttcaagggcaaagccacactgactgcagacaaatcttcgagcacagcctatatgcagctcagtagcctgacatttgaggactctgctgtctatttctgtgcaagactgaggaactgggacgagcctatggactactggggccaagggaccacggtcaccgtctcctcaggtggtggtggttctggcggcggcggctccggtggtggtggttctgagctcgtgatgacacagtctccatcctccctgactgtgacagcaggagagaaggtcactatgagctgcaagtccagtcagagtctgttaaacagtggaaatcaaaagaactacttgacctggtaccagcagaaaccagggcagcctcctaaactgttgatctactgggcatccactagggaatctggggtccctgatcgcttcacaggcagtggatctggaacagatttcactctcaccatcagcagtgtgcaggctgaagacctggcagtttattactgtcagaatgattatagttatccgctcacgttcggtgctgggaccaagcttgagatcaaatccggaggtggtggatccgacgtccaactggtgcagtcaggggctgaagtgaaaaaacctggggcctcagtgaaggtgtcctgcaaggcttctggctacacctttactaggtacacgatgcactgggtaaggcaggcacctggacagggtctggaatggattggatacattaatcctagccgtggttatactaattacgcagacagcgtcaagggccgcttcacaatcactacagacaaatccaccagcacagcctacatggaactgagcagcctgcgttctgaggacactgcaacctattactgtgcaagatattatgatgatcattactgccttgactactggggccaaggcaccacggtcaccgtctcctcaggcgaaggtactagtactggttctggtggaagtggaggttcaggtggagcagacgacattcagatgacccagtctccatctagcctgtctgcatctgtcggggaccgtgtcaccatcacctgcagagccagtcaaagtgtaagttacatgaactggtaccagcagaagccgggcaaggcacccaaaagatggatttatgacacatccaaagtggcttctggagtccctgctcgcttcagtggcagtgggtctgggaccgactactctctcacaatcaacagcttggaggctgaagatgctgccacttattactgccaacagtggagtagtaacccgctcacgttcggtggcgggaccaaggtggagatcaaa

SEQ ID NO: 239 - protein, 497 aa, artificial sequence
  5-10xVH5VL1 HLHL
EVQLLEQSGAELVRPGTSVKISCKASGYAFTNYWLGWVKQRPGHGLEWIGDIFPGSGNIHYNEKFKGKATLTADKSSSTAYMQLSSLTFEDSAVYFCARLRNWDEPMDYWGQGTTVTVSSGGGGSGGGGSGGGGSELVMTQSPSSLTVTAGEKVTMSCKSSQSLLNSGNQKNYLTWYQQKPGQPPKLLIYWASTRESGVPDRFTGSGSGTDFTLTISSVQAEDLAVYYCQNDYSYPLTFGAGTKLEIKSGGGGSDVQLVQSGAEVKKPGASVKVSCKASGYTFTRYTMHWVRQAPGQGLEWIGYINPSRGYTNYADSVKGRFTITTDKSTSTAYMELSSLRSEDTATYYCARYYDDHYCLDYWGQGTTVTVSSGEGTSTGSGGSGGSGGADDIQMTQSPSSLSASVGDRVTITCRASQSVSYMNWYQQKPGKAPKRWIYDTSKVASGVPARFSGSGSGTDYSLTINSLEAEDAATYYCQQWSSNPLTFGGGTKVEIK

SEQ ID NO: 240 - DNA, 1488 bp, artificial sequence
  5-10xVL1VH5 LHLH
gagctcgtgatgacacagtctccatcctccctgactgtgacagcaggagagaaggtcactatgagctgcaagtccagtcagagtctgttaaacagtggaaatcaaaagaactacttgacctggtaccagcagaaaccagggcagcctcctaaactgttgatctactgggcatccactagggaatctggggtccctgatcgcttcacaggcagtggatctggaacagatttcactctcaccatcagcagtgtgcaggctgaagacctggcagtttattactgtcagaatgattatagttatccgctcacgttcggtgctgggaccaagcttgagatcaaaggtggtggtggttctggcggcggcggctccggtggtggtggttctgaggtgcagctgctcgagcagtctggagctgagctggtaaggcctgggacttcagtgaagatatcctgcaaggcttctggatacgccttcactaactactggctaggttgggtaaagcagaggcctggacatggacttgagtggattggagatattttccctggaagtggtaatatccactacaatgagaagttcaagggcaaagccacactgactgcagacaaatcttcgagcacagcctatatgcagctcagtagcctgacatttgaggactctgctgtctatttctgtgcaagactgaggaactgggacgagcctatggactactggggccaagggaccacggtcaccgtctcctccggaggtggtggatccgacattcagatgacccagtctccatctagcctgtctgcatctgtcggggaccgtgtcaccatcacctgcagagccagtcaaagtgtaagttacatgaactggtaccagcagaagccgggcaaggcacccaaaagatggatttatgacacatccaaagtggcttctggagtccctgctcgcttcagtggcagtgggtctgggaccgactactctctcacaatcaacagcttggaggctgaagatgctgccacttattactgccaacagtggagtagtaacccgctcacgttcggtggcgggaccaaggtggagatcaaaggcgaaggtactagtactggttctggtggaagtggaggttcaggtggagcagacgacgtccaactggtgcagtcaggggctgaagtgaaaaaacctggggcctcagtgaaggtgtcctgcaaggcttctggctacacctttactaggtacacgatgcactgggtaaggcaggcacctggacagggtctggaatggattggatacattaatcctagccgtggttatactaattacgcagacagcgtcaagggccgcttcacaatcactacagacaaatccaccagcacagcctacatggaactgagcagcctgcgttctgaggacactgcaacctattactgtgcaagatattatgatgatcattactgccttgactactggggccaaggcaccacggtcaccgtctcctca

SEQ ID NO: 241 - protein, 496 aa, artificial sequence
  5-10xVL1VH5 LHLH
ELVMTQSPSSLTVTAGEKVTMSCKSSQSLLNSGNQKNYLTWYQQKPGQPPKLLIYWASTRESGVPDRFTGSGSGTDFTLTISSVQAEDLAVYYCQNDYSYPLTFGAGTKLEIKGGGGSGGGGSGGGGSEVQLLEQSGAELVRPGTSVKISCKASGYAFTNYWLGWVKQRPGHGLEWIGDIFPGSGNIHYNEKFKGKATLTADKSSSTAYMQLSSLTFEDSAVYFCARLRNWDEPMDYWGQGTTVTVSSGGGGSDIQMTQSPSSLSASVGDRVTITCRASQSVSYMNWYQQKPGKAPKRWIYDTSKVASGVPARFSGSGSGTDYSLTINSLEAEDAATYYCQQWSSNPLTFGGGTKVEIKGEGTSTGSGGSGGSGGADDVQLVQSGAEVKKPGASVKVSCKASGYTFTRYTMHWVRQAPGQGLEWIGYINPSRGYTNYADSVKGRFTITTDKSTSTAYMELSSLRSEDTATYYCARYYDDHYCLDYWGQGTTVTVSS

SEQ ID NO: 242 - DNA, 1491 bp, artificial sequence
  5-10xVL1VH5 HLLH
gaggtgcagctgctcgagcagtctggagctgagctggtaaggcctgggacttcagtgaagatatcctgcaaggcttctggatacgccttcactaactactggctaggttgggtaaagcagaggcctggacatggacttgagtggattggagatattttccctggaagtggtaatatccactacaatgagaagttcaagggcaaagccacactgactgcagacaaatcttcgagcacagcctatatgcagctcagtagcctgacatttgaggactctgctgtctatttctgtgcaagactgaggaactgggacgagcctatggactactggggccaagggaccacggtcaccgtctcctcaggtggtggtggttctggcggcggcggctccggtggtggtggttctgagctcgtgatgacacagtctccatcctccctgactgtgacagcaggagagaaggtcactatgagctgcaagtccagtcagagtctgttaaacagtggaaatcaaaagaactacttgacctggtaccagcagaaaccagggcagcctcctaaactgttgatctactgggcatccactagggaatctggggtccctgatcgcttcacaggcagtggatctggaacagatttcactctcaccatcagcagtgtgcaggctgaagacctggcagtttattactgtcagaatgattatagttatccgctcacgttcggtgctgggaccaagcttgagatcaaatccggaggtggtggatccgacattcagatgacccagtctccatctagcctgtctgcatctgtcggggaccgtgtcaccatcacctgcagagccagtcaaagtgtaagttacatgaactggtaccagcagaagccgggcaaggcacccaaaagatggatttatgacacatccaaagtggcttctggagtccctgctcgcttcagtggcagtgggtctgggaccgactactctctcacaatcaacagcttggaggctgaagatgctgccacttattactgccaacagtggagtagtaacccgctcacgttcggtggcgggaccaaggtggagatcaaaggcgaaggtactagtactggttctggtggaagtggaggttcaggtggagcagacgacgtccaactggtgcagtcaggggctgaagtgaaaaaacctggggcctcagtgaaggtgtcctgcaaggcttctggctacacctttactaggtacacgatgcactgggtaaggcaggcacctggacagggtctggaatggattggatacattaatcctagccgtggttatactaattacgcagacagcgtcaagggccgcttcacaatcactacagacaaatccaccagcacagcctacatggaactgagcagcctgcgttctgaggacactgcaacctattactgtgcaagatattatgatgatcattactgccttgactactggggccaaggcaccacggtcaccgtctcctca

SEQ ID NO: 243 - protein, 497 aa, artificial sequence
  5-10xVL1VH5 HLLH
EVQLLEQSGAELVRPGTSVKISCKASGYAFTNYWLGWVKQRPGHGLEWIGDIFPGSGNIHYNEKFKGKATLTADKSSSTAYMQLSSLTFEDSAVYFCARLRNWDEPMDYWGQGTTVTVSSGGGGSGGGGSGGGGSELVMTQSPSSLTVTAGEKVTMSCKSSQSLLNSGNQKNYLTWYQQKPGQPPKLLIYWASTRESGVPDRFTGSGSGTDFTLTISSVQAEDLAVYYCQNDYSYPLTFGAGTKLEIKSGGGGSDIQMTQSPSSLSASVGDRVTITCRASQSVSYMNWYQQKPGKAPKRWIYDTSKVASGVPARFSGSGSGTDYSLTINSLEAEDAATYYCQQWSSNPLTFGGGTKVEIKGEGTSTGSGGSGGSGGADDVQLVQSGAEVKKPGASVKVSCKASGYTFTRYTMHWVRQAPGQGLEWIGYINPSRGYTNYADSVKGRFTITTDKSTSTAYMELSSLRSEDTATYYCARYYDDHYCLDYWGQGTTVTVSS

SEQ ID NO: 244 - DNA, 1491 bp, artificial sequence
  5-10xVH5VL2 HLHL
gaggtgcagctgctcgagcagtctggagctgagctggtaaggcctgggacttcagtgaagatatcctgcaaggcttctggatacgccttcactaactactggctaggttgggtaaagcagaggcctggacatggacttgagtggattggagatattttccctggaagtggtaatatccactacaatgagaagttcaagggcaaagccacactgactgcagacaaatcttcgagcacagcctatatgcagctcagtagcctgacatttgaggactctgctgtctatttctgtgcaagactgaggaactgggacgagcctatggactactggggccaagggaccacggtcaccgtctcctcaggtggtggtggttctggcggcggcggctccggtggtggtggttctgagctcgtgatgacacagtctccatcctccctgactgtgacagcaggagagaaggtcactatgagctgcaagtccagtcagagtctgttaaacagtggaaatcaaaagaactacttgacctggtaccagcagaaaccagggcagcctcctaaactgttgatctactgggcatccactagggaatctggggtccctgatcgcttcacaggcagtggatctggaacagatttcactctcaccatcagcagtgtgcaggctgaagacctggcagtttattactgtcagaatgattatagttatccgctcacgttcggtgctgggaccaagcttgagatcaaatccggaggtggtggatccgacgtccaactggtgcagtcaggggctgaagtgaaaaaacctggggcctcagtgaaggtgtcctgcaaggcttctggctacacctttactaggtacacgatgcactgggtaaggcaggcacctggacagggtctggaatggattggatacattaatcctagccgtggttatactaattacgcagacagcgtcaagggccgcttcacaatcactacagacaaatccaccagcacagcctacatggaactgagcagcctgcgttctgaggacactgcaacctattactgtgcaagatattatgatgatcattactgccttgactactggggccaaggcaccacggtcaccgtctcctcaggcgaaggtactagtactggttctggtggaagtggaggttcaggtggagcagacgacattgtactgacccagtctccagcaactctgtctctgtctccaggggagcgtgccaccctgagctgcagagccagtcaaagtgtaagttacatgaactggtaccagcagaagccgggcaaggcacccaaaagatggatttatgacacatccaaagtggcttctggagtccctgctcgcttcagtggcagtgggtctgggaccgactactctctcacaatcaacagcttggaggctgaagatgctgccacttattactgccaacagtggagtagtaacccgctcacgttcggtggcgggaccaaggtggagatcaaa

SEQ ID NO: 245 - protein, 497 aa, artificial sequence
  5-10xVH5VL2 HLHL
EVQLLEQSGAELVRPGTSVKISCKASGYAFTNYWLGWVKQRPGHGLEWIGDIFPGSGNIHYNEKFKGKATLTADKSSSTAYMQLSSLTFEDSAVYFCARLRNWDEPMDYWGQGTTVTVSSGGGGSGGGGSGGGGSELVMTQSPSSLTVTAGEKVTMSCKSSQSLLNSGNQKNYLTWYQQKPGQPPKLLIYWASTRESGVPDRFTGSGSGTDFTLTISSVQAEDLAVYYCQNDYSYPLTFGAGTKLEIKSGGGGSDVQLVQSGAEVKKPGASVKVSCKASGYTFTRYTMHWVRQAPGQGLEWIGYINPSRGYTNYADSVKGRFTITTDKSTSTAYMELSSLRSEDTATYYCARYYDDHYCLDYWGQGTTVTVSSGEGTSTGSGGSGGSGGADDIVLTQSPATLSLSPGERATLSCRASQSVSYMNWYQQKPGKAPKRWIYDTSKVASGVPARFSGSGSGTDYSLTINSLEAEDAATYYCQQWSSNPLTFGGGTKVEIK

SEQ ID NO: 246 - DNA, 1488 bp, artificial sequence
  5-10xVL2VH5 LHLH
gagctcgtgatgacacagtctccatcctccctgactgtgacagcaggagagaaggtcactatgagctgcaagtccagtcagagtctgttaaacagtggaaatcaaaagaactacttgacctggtaccagcagaaaccagggcagcctcctaaactgttgatctactgggcatccactagggaatctggggtccctgatcgcttcacaggcagtggatctggaacagatttcactctcaccatcagcagtgtgcaggctgaagacctggcagtttattactgtcagaatgattatagttatccgctcacgttcggtgctgggaccaagcttgagatcaaaggtggtggtggttctggcggcggcggctccggtggtggtggttctgaggtgcagctgctcgagcagtctggagctgagctggtaaggcctgggacttcagtgaagatatcctgcaaggcttctggatacgccttcactaactactggctaggttgggtaaagcagaggcctggacatggacttgagtggattggagatattttccctggaagtggtaatatccactacaatgagaagttcaagggcaaagccacactgactgcagacaaatcttcgagcacagcctatatgcagctcagtagcctgacatttgaggactctgctgtctatttctgtgcaagactgaggaactgggacgagcctatggactactggggccaagggaccacggtcaccgtctcctccggaggtggtggatccgacattgtactgacccagtctccagcaactctgtctctgtctccaggggagcgtgccaccctgagctgcagagccagtcaaagtgtaagttacatgaactggtaccagcagaagccgggcaaggcacccaaaagatggatttatgacacatccaaagtggcttctggagtccctgctcgcttcagtggcagtgggtctgggaccgactactctctcacaatcaacagcttggaggctgaagatgctgccacttattactgccaacagtggagtagtaacccgctcacgttcggtggcgggaccaaggtggagatcaaaggcgaaggtactagtactggttctggtggaagtggaggttcaggtggagcagacgacgtccaactggtgcagtcaggggctgaagtgaaaaaacctggggcctcagtgaaggtgtcctgcaaggcttctggctacacctttactaggtacacgatgcactgggtaaggcaggcacctggacagggtctggaatggattggatacattaatcctagccgtggttatactaattacgcagacagcgtcaagggccgcttcacaatcactacagacaaatccaccagcacagcctacatggaactgagcagcctgcgttctgaggacactgcaacctattactgtgcaagatattatgatgatcattactgccttgactactggggccaaggcaccacggtcaccgtctcctca

SEQ ID NO: 247 - protein, 496 aa, artificial sequence
  5-10xVL2VH5 LHLH
ELVMTQSPSSLTVTAGEKVTMSCKSSQSLLNSGNQKNYLTWYQQKPGQPPKLLIYWASTRESGVPDRFTGSGSGTDFTLTISSVQAEDLAVYYCQNDYSYPLTFGAGTKLEIKGGGGSGGGGSGGGGSEVQLLEQSGAELVRPGTSVKISCKASGYAFTNYWLGWVKQRPGHGLEWIGDIFPGSGNIHYNEKFKGKATLTADKSSSTAYMQLSSLTFEDSAVYFCARLRNWDEPMDYWGQGTTVTVSSGGGGSDIVLTQSPATLSLSPGERATLSCRASQSVSYMNWYQQKPGKAPKRWIYDTSKVASGVPARFSGSGSGTDYSLTINSLEAEDAATYYCQQWSSNPLTFGGGTKVEIKGEGTSTGSGGSGGSGGADDVQLVQSGAEVKKPGASVKVSCKASGYTFTRYTMHWVRQAPGQGLEWIGYINPSRGYTNYADSVKGRFTITTDKSTSTAYMELSSLRSEDTATYYCARYYDDHYCLDYWGQGTTVTVSS

SEQ ID NO: 248 - DNA, 1491 bp, artificial sequence
  5-10xVL2VH5 HLLH
gaggtgcagctgctcgagcagtctggagctgagctggtaaggcctgggacttcagtgaagatatcctgcaaggcttctggatacgccttcactaactactggctaggttgggtaaagcagaggcctggacatggacttgagtggattggagatattttccctggaagtggtaatatccactacaatgagaagttcaagggcaaagccacactgactgcagacaaatcttcgagcacagcctatatgcagctcagtagcctgacatttgaggactctgctgtctatttctgtgcaagactgaggaactgggacgagcctatggactactggggccaagggaccacggtcaccgtctcctcaggtggtggtggttctggcggcggcggctccggtggtggtggttctgagctcgtgatgacacagtctccatcctccctgactgtgacagcaggagagaaggtcactatgagctgcaagtccagtcagagtctgttaaacagtggaaatcaaaagaactacttgacctggtaccagcagaaaccagggcagcctcctaaactgttgatctactgggcatccactagggaatctggggtccctgatcgcttcacaggcagtggatctggaacagatttcactctcaccatcagcagtgtgcaggctgaagacctggcagtttattactgtcagaatgattatagttatccgctcacgttcggtgctgggaccaagcttgagatcaaatccggaggtggtggatccgacattgtactgacccagtctccagcaactctgtctctgtctccaggggagcgtgccaccctgagctgcagagccagtcaaagtgtaagttacatgaactggtaccagcagaagccgggcaaggcacccaaaagatggatttatgacacatccaaagtggcttctggagtccctgctcgcttcagtggcagtgggtctgggaccgactactctctcacaatcaacagcttggaggctgaagatgctgccacttattactgccaacagtggagtagtaacccgctcacgttcggtggcgggaccaaggtggagatcaaaggcgaaggtactagtactggttctggtggaagtggaggttcaggtggagcagacgacgtccaactggtgcagtcaggggctgaagtgaaaaaacctggggcctcagtgaaggtgtcctgcaaggcttctggctacacctttactaggtacacgatgcactgggtaaggcaggcacctggacagggtctggaatggattggatacattaatcctagccgtggttatactaattacgcagacagcgtcaagggccgcttcacaatcactacagacaaatccaccagcacagcctacatggaactgagcagcctgcgttctgaggacactgcaacctattactgtgcaagatattatgatgatcattactgccttgactactggggccaaggcaccacggtcaccgtctcctca

SEQ ID NO: 249 - protein, 497 aa, artificial sequence
  5-10xVL2VH5 HLLH
EVQLLEQSGAELVRPGTSVKISCKASGYAFTNYWLGWVKQRPGHGLEWIGDIFPGSGNIHYNEKFKGKATLTADKSSSTAYMQLSSLTFEDSAVYFCARLRNWDEPMDYWGQGTTVTVSSGGGGSGGGGSGGGGSELVMTQSPSSLTVTAGEKVTMSCKSSQSLLNSGNQKNYLTWYQQKPGQPPKLLIYWASTRESGVPDRFTGSGSGTDFTLTISSVQAEDLAVYYCQNDYSYPLTFGAGTKLEIKSGGGGSDIVLTQSPATLSLSPGERATLSCRASQSVSYMNWYQQKPGKAPKRWIYDTSKVASGVPARFSGSGSGTDYSLTINSLEAEDAATYYCQQWSSNPLTFGGGTKVEIKGEGTSTGSGGSGGSGGADDVQLVQSGAEVKKPGASVKVSCKASGYTFTRYTMHWVRQAPGQGLEWIGYINPSRGYTNYADSVKGRFTITTDKSTSTAYMELSSLRSEDTATYYCARYYDDHYCLDYWGQGTTVTVSS

SEQ ID NO: 250 - DNA, 1488 bp, artificial sequence
  5-10 VH5VL3 LHHL
gagctcgtgatgacacagtctccatcctccctgactgtgacagcaggagagaaggtcactatgagctgcaagtccagtcagagtctgttaaacagtggaaatcaaaagaactacttgacctggtaccagcagaaaccagggcagcctcctaaactgttgatctactgggcatccactagggaatctggggtccctgatcgcttcacaggcagtggatctggaacagatttcactctcaccatcagcagtgtgcaggctgaagacctggcagtttattactgtcagaatgattatagttatccgctcacgttcggtgctgggaccaagcttgagatcaaaggtggtggtggttctggcggcggcggctccggtggtggtggttctgaggtgcagctgctcgagcagtctggagctgagctggtaaggcctgggacttcagtgaagatatcctgcaaggcttctggatacgccttcactaactactggctaggttgggtaaagcagaggcctggacatggacttgagtggattggagatattttccctggaagtggtaatatccactacaatgagaagttcaagggcaaagccacactgactgcagacaaatcttcgagcacagcctatatgcagctcagtagcctgacatttgaggactctgctgtctatttctgtgcaagactgaggaactgggacgagcctatggactactggggccaagggaccacggtcaccgtctcctccggaggtggtggatccgacgtccaactggtgcagtcaggggctgaagtgaaaaaacctggggcctcagtgaaggtgtcctgcaaggcttctggctacacctttactaggtacacgatgcactgggtaaggcaggcacctggacagggtctggaatggattggatacattaatcctagccgtggttatactaattacgcagacagcgtcaagggccgcttcacaatcactacagacaaatccaccagcacagcctacatggaactgagcagcctgcgttctgaggacactgcaacctattactgtgcaagatattatgatgatcattactgccttgactactggggccaaggcaccacggtcaccgtctcctcaggcgaaggtactagtactggttctggtggaagtggaggttcaggtggagcagacgacattgtactgacccagtctccagcaactctgtctctgtctccaggggagcgtgccaccctgacctgcagagccagttcaagtgtaagttacatgaactggtaccagcagaagccgggcaaggcacccaaaagatggatttatgacacatccaaagtggcttctggagtccctgctcgcttcagtggcagtgggtctgggaccgactactctctcacaatcaacagcttggaggctgaagatgctgccacttattactgccaacagtggagtagtaacccgctcacgttcggtggcgggaccaaggtggagatcaaa

SEQ ID NO: 251 - protein, 496 aa, artificial sequence
  5-10VH5VL3 LHHL
ELVMTQSPSSLTVTAGEKVTMSCKSSQSLLNSGNQKNYLTWYQQKPGQPPKLLIYWASTRESGVPDRFTGSGSGTDFTLTISSVQAEDLAVYYCQNDYSYPLTFGAGTKLEIKGGGGSGGGGSGGGGSEVQLLEQSGAELVRPGTSVKISCKASGYAFTNYWLGWVKQRPGHGLEWIGDIFPGSGNIHYNEKFKGKATLTADKSSSTAYMQLSSLTFEDSAVYFCARLRNWDEPMDYWGQGTTVTVSSGGGGSDVQLVQSGAEVKKPGASVKVSCKASGYTFTRYTMHWVRQAPGQGLEWIGYINPSRGYTNYADSVKGRFTITTDKSTSTAYMELSSLRSEDTATYYCARYYDDHYCLDYWGQGTTVTVSSGEGTSTGSGGSGGSGGADDIVLTQSPATLSLSPGERATLTCRASSSVSYMNWYQQKPGKAPKRWIYDTSKVASGVPARFSGSGSGTDYSLTINSLEAEDAATYYCQQWSSNPLTFGGGTKVEIK

SEQ ID NO: 252 - DNA, 1491 bp, artificial sequence
  5-10VH5VL3 HLHL
gaggtgcagctgctcgagcagtctggagctgagctggtaaggcctgggacttcagtgaagatatcctgcaaggcttctggatacgccttcactaactactggctaggttgggtaaagcagaggcctggacatggacttgagtggattggagatattttccctggaagtggtaatatccactacaatgagaagttcaagggcaaagccacactgactgcagacaaatcttcgagcacagcctatatgcagctcagtagcctgacatttgaggactctgctgtctatttctgtgcaagactgaggaactgggacgagcctatggactactggggccaagggaccacggtcaccgtctcctcaggtggtggtggttctggcggcggcggctccggtggtggtggttctgagctcgtgatgacacagtctccatcctccctgactgtgacagcaggagagaaggtcactatgagctgcaagtccagtcagagtctgttaaacagtggaaatcaaaagaactacttgacctggtaccagcagaaaccagggcagcctcctaaactgttgatctactgggcatccactagggaatctggggtccctgatcgcttcacaggcagtggatctggaacagatttcactctcaccatcagcagtgtgcaggctgaagacctggcagtttattactgtcagaatgattatagttatccgctcacgttcggtgctgggaccaagcttgagatcaaatccggaggtggtggatccgacgtccaactggtgcagtcaggggctgaagtgaaaaaacctggggcctcagtgaaggtgtcctgcaaggcttctggctacacctttactaggtacacgatgcactgggtaaggcaggcacctggacagggtctggaatggattggatacattaatcctagccgtggttatactaattacgcagacagcgtcaagggccgcttcacaatcactacagacaaatccaccagcacagcctacatggaactgagcagcctgcgttctgaggacactgcaacctattactgtgcaagatattatgatgatcattactgccttgactactggggccaaggcaccacggtcaccgtctcctcaggcgaaggtactagtactggttctggtggaagtggaggttcaggtggagcagacgacattgtactgacccagtctccagcaactctgtctctgtctccaggggagcgtgccaccctgacctgcagagccagttcaagtgtaagttacatgaactggtaccagcagaagccgggcaaggcacccaaaagatggatttatgacacatccaaagtggcttctggagtccctgctcgcttcagtggcagtgggtctgggaccgactactctctcacaatcaacagcttggaggctgaagatgctgccacttattactgccaacagtggagtagtaacccgctcacgttcggtggcgggaccaaggtggagatcaaa

SEQ ID NO: 253 - protein, 497 aa, artificial sequence
  5-10VH5VL3 HLHL
EVQLLEQSGAELVRPGTSVKISCKASGYAFTNYWLGWVKQRPGHGLEWIGDIFPGSGNIHYNEKFKGKATLTADKSSSTAYMQLSSLTFEDSAVYFCARLRNWDEPMDYWGQGTTVTVSSGGGGSGGGGSGGGGSELVMTQSPSSLTVTAGEKVTMSCKSSQSLLNSGNQKNYLTWYQQKPGQPPKLLIYWASTRESGVPDRFTGSGSGTDFTLTISSVQAEDLAVYYCQNDYSYPLTFGAGTKLEIKSGGGGSDVQLVQSGAEVKKPGASVKVSCKASGYTFTRYTMHWVRQAPGQGLEWIGYINPSRGYTNYADSVKGRFTITTDKSTSTAYMELSSLRSEDTATYYCARYYDDHYCLDYWGQGTTVTVSSGEGTSTGSGGSGGSGGADDIVLTQSPATLSLSPGERATLTCRASSSVSYMNWYQQKPGKAPKRWIYDTSKVASGVPARFSGSGSGTDYSLTINSLEAEDAATYYCQQWSSNPLTFGGGTKVEIK

SEQ ID NO: 254 - DNA, 1488 bp, artificial sequence
  5-10VL3VH5 LHLH
gagctcgtgatgacacagtctccatcctccctgactgtgacagcaggagagaaggtcactatgagctgcaagtccagtcagagtctgttaaacagtggaaatcaaaagaactacttgacctggtaccagcagaaaccagggcagcctcctaaactgttgatctactgggcatccactagggaatctggggtccctgatcgcttcacaggcagtggatctggaacagatttcactctcaccatcagcagtgtgcaggctgaagacctggcagtttattactgtcagaatgattatagttatccgctcacgttcggtgctgggaccaagcttgagatcaaaggtggtggtggttctggcggcggcggctccggtggtggtggttctgaggtgcagctgctcgagcagtctggagctgagctggtaaggcctgggacttcagtgaagatatcctgcaaggcttctggatacgccttcactaactactggctaggttgggtaaagcagaggcctggacatggacttgagtggattggagatattttccctggaagtggtaatatccactacaatgagaagttcaagggcaaagccacactgactgcagacaaatcttcgagcacagcctatatgcagctcagtagcctgacatttgaggactctgctgtctatttctgtgcaagactgaggaactgggacgagcctatggactactggggccaagggaccacggtcaccgtctcctccggaggtggtggatccgacattgtactgacccagtctccagcaactctgtctctgtctccaggggagcgtgccaccctgacctgcagagccagttcaagtgtaagttacatgaactggtaccagcagaagccgggcaaggcacccaaaagatggatttatgacacatccaaagtggcttctggagtccctgctcgcttcagtggcagtgggtctgggaccgactactctctcacaatcaacagcttggaggctgaagatgctgccacttattactgccaacagtggagtagtaacccgctcacgttcggtggcgggaccaaggtggagatcaaaggcgaaggtactagtactggttctggtggaagtggaggttcaggtggagcagacgacgtccaactggtgcagtcaggggctgaagtgaaaaaacctggggcctcagtgaaggtgtcctgcaaggcttctggctacacctttactaggtacacgatgcactgggtaaggcaggcacctggacagggtctggaatggattggatacattaatcctagccgtggttatactaattacgcagacagcgtcaagggccgcttcacaatcactacagacaaatccaccagcacagcctacatggaactgagcagcctgcgttctgaggacactgcaacctattactgtgcaagatattatgatgatcattactgccttgactactggggccaaggcaccacggtcaccgtctcctca

SEQ ID NO: 255 - protein, 496 aa, artificial sequence
  5-10VL3VH5 LHLH
ELVMTQSPSSLTVTAGEKVTMSCKSSQSLLNSGNQKNYLTWYQQKPGQPPKLLIYWASTRESGVPDRFTGSGSGTDFTLTISSVQAEDLAVYYCQNDYSYPLTFGAGTKLEIKGGGGSGGGGSGGGGSEVQLLEQSGAELVRPGTSVKISCKASGYAFTNYWLGWVKQRPGHGLEWIGDIFPGSGNIHYNEKFKGKATLTADKSSSTAYMQLSSLTFEDSAVYFCARLRNWDEPMDYWGQGTTVTVSSGGGGSDIVLTQSPATLSLSPGERATLTCRASSSVSYMNWYQQKPGKAPKRWIYDTSKVASGVPARFSGSGSGTDYSLTINSLEAEDAATYYCQQWSSNPLTFGGGTKVEIKGEGTSTGSGGSGGSGGADDVQLVQSGAEVKKPGASVKVSCKASGYTFTRYTMHWVRQAPGQGLEWIGYINPSRGYTNYADSVKGRFTITTDKSTSTAYMELSSLRSEDTATYYCARYYDDHYCLDYWGQGTTVTVSS

SEQ ID NO: 256 - DNA, 1491 bp, artificial sequence
  5-10VL3VH5 HLLH
gaggtgcagctgctcgagcagtctggagctgagctggtaaggcctgggacttcagtgaagatatcctgcaaggcttctggatacgccttcactaactactggctaggttgggtaaagcagaggcctggacatggacttgagtggattggagatattttccctggaagtggtaatatccactacaatgagaagttcaagggcaaagccacactgactgcagacaaatcttcgagcacagcctatatgcagctcagtagcctgacatttgaggactctgctgtctatttctgtgcaagactgaggaactgggacgagcctatggactactggggccaagggaccacggtcaccgtctcctcaggtggtggtggttctggcggcggcggctccggtggtggtggttctgagctcgtgatgacacagtctccatcctccctgactgtgacagcaggagagaaggtcactatgagctgcaagtccagtcagagtctgttaaacagtggaaatcaaaagaactacttgacctggtaccagcagaaaccagggcagcctcctaaactgttgatctactgggcatccactagggaatctggggtccctgatcgcttcacaggcagtggatctggaacagatttcactctcaccatcagcagtgtgcaggctgaagacctggcagtttattactgtcagaatgattatagttatccgctcacgttcggtgctgggaccaagcttgagatcaaatccggaggtggtggatccgacattgtactgacccagtctccagcaactctgtctctgtctccaggggagcgtgccaccctgacctgcagagccagttcaagtgtaagttacatgaactggtaccagcagaagccgggcaaggcacccaaaagatggatttatgacacatccaaagtggcttctggagtccctgctcgcttcagtggcagtgggtctgggaccgactactctctcacaatcaacagcttggaggctgaagatgctgccacttattactgccaacagtggagtagtaacccgctcacgttcggtggcgggaccaaggtggagatcaaaggcgaaggtactagtactggttctggtggaagtggaggttcaggtggagcagacgacgtccaactggtgcagtcaggggctgaagtgaaaaaacctggggcctcagtgaaggtgtcctgcaaggcttctggctacacctttactaggtacacgatgcactgggtaaggcaggcacctggacagggtctggaatggattggatacattaatcctagccgtggttatactaattacgcagacagcgtcaagggccgcttcacaatcactacagacaaatccaccagcacagcctacatggaactgagcagcctgcgttctgaggacactgcaacctattactgtgcaagatattatgatgatcattactgccttgactactggggccaaggcaccacggtcaccgtctcctca

SEQ ID NO: 257 - protein, 497 aa, artificial sequence
  5-10VL3VH5 HLLH
EVQLLEQSGAELVRPGTSVKISCKASGYAFTNYWLGWVKQRPGHGLEWIGDIFPGSGNIHYNEKFKGKATLTADKSSSTAYMQLSSLTFEDSAVYFCARLRNWDEPMDYWGQGTTVTVSSGGGGSGGGGSGGGGSELVMTQSPSSLTVTAGEKVTMSCKSSQSLLNSGNQKNYLTWYQQKPGQPPKLLIYWASTRESGVPDRFTGSGSGTDFTLTISSVQAEDLAVYYCQNDYSYPLTFGAGTKLEIKSGGGGSDIVLTQSPATLSLSPGERATLTCRASSSVSYMNWYQQKPGKAPKRWIYDTSKVASGVPARFSGSGSGTDYSLTINSLEAEDAATYYCQQWSSNPLTFGGGTKVEIKGEGTSTGSGGSGGSGGADDVQLVQSGAEVKKPGASVKVSCKASGYTFTRYTMHWVRQAPGQGLEWIGYINPSRGYTNYADSVKGRFTITTDKSTSTAYMELSSLRSEDTATYYCARYYDDHYCLDYWGQGTTVTVSS

SEQ ID NO: 258 - DNA, 1488 bp, artificial sequence
  5-10VH7VL1 LHHL
gagctcgtgatgacacagtctccatcctccctgactgtgacagcaggagagaaggtcactatgagctgcaagtccagtcagagtctgttaaacagtggaaatcaaaagaactacttgacctggtaccagcagaaaccagggcagcctcctaaactgttgatctactgggcatccactagggaatctggggtccctgatcgcttcacaggcagtggatctggaacagatttcactctcaccatcagcagtgtgcaggctgaagacctggcagtttattactgtcagaatgattatagttatccgctcacgttcggtgctgggaccaagcttgagatcaaaggtggtggtggttctggcggcggcggctccggtggtggtggttctgaggtgcagctgctcgagcagtctggagctgagctggtaaggcctgggacttcagtgaagatatcctgcaaggcttctggatacgccttcactaactactggctaggttgggtaaagcagaggcctggacatggacttgagtggattggagatattttccctggaagtggtaatatccactacaatgagaagttcaagggcaaagccacactgactgcagacaaatcttcgagcacagcctatatgcagctcagtagcctgacatttgaggactctgctgtctatttctgtgcaagactgaggaactgggacgagcctatggactactggggccaagggaccacggtcaccgtctcctccggaggtggtggatccgacgtccaactggtgcagtcaggggctgaagtgaaaaaacctggggcctcagtgaaggtgtcctgcaaggcttctggctacacctttactaggtacacgatgcactgggtaaggcaggcacctggacagggtctggaatggattggatacattaatcctagccgtggttatactaattacaatcagaagttcaaggaccgcgtcacaatcactacagacaaatccaccagcacagcctacatggaactgagcagcctgcgttctgaggacactgcagtctattactgtgcaagatattatgatgatcattactgccttgactactggggccaaggcaccacggtcaccgtctcctcaggcgaaggtactagtactggttctggtggaagtggaggttcaggtggagcagacgacattcagatgacccagtctccatctagcctgtctgcatctgtcggggaccgtgtcaccatcacctgcagagccagtcaaagtgtaagttacatgaactggtaccagcagaagccgggcaaggcacccaaaagatggatttatgacacatccaaagtggcttctggagtccctgctcgcttcagtggcagtgggtctgggaccgactactctctcacaatcaacagcttggaggctgaagatgctgccacttattactgccaacagtggagtagtaacccgctcacgttcggtggcgggaccaaggtggagatcaaa

SEQ ID NO: 259 - protein, 496 aa, artificial sequence
  5-10VH7VL1 LHHL
ELVMTQSPSSLTVTAGEKVTMSCKSSQSLLNSGNQKNYLTWYQQKPGQPPKLLIYWASTRESGVPDRFTGSGSGTDFTLTISSVQAEDLAVYYCQNDYSYPLTFGAGTKLEIKGGGGSGGGGSGGGGSEVQLLEQSGAELVRPGTSVKISCKASGYAFTNYWLGWVKQRPGHGLEWIGDIFPGSGNIHYNEKFKGKATLTADKSSSTAYMQLSSLTFEDSAVYFCARLRNWDEPMDYWGQGTTVTVSSGGGGSDVQLVQSGAEVKKPGASVKVSCKASGYTFTRYTMHWVRQAPGQGLEWIGYINPSRGYTNYNQKFKDRVTITTDKSTSTAYMELSSLRSEDTAVYYCARYYDDHYCLDYWGQGTTVTVSSGEGTSTGSGGSGGSGGADDIQMTQSPSSLSASVGDRVTITCRASQSVSYMNWYQQKPGKAPKRWIYDTSKVASGVPARFSGSGSGTDYSLTINSLEAEDAATYYCQQWSSNPLTFGGGTKVEIK

SEQ ID NO: 260 - DNA, 1491 bp, artificial sequence
  5-10VH7VL1 HLHL
gaggtgcagctgctcgagcagtctggagctgagctggtaaggcctgggacttcagtgaagatatcctgcaaggcttctggatacgccttcactaactactggctaggttgggtaaagcagaggcctggacatggacttgagtggattggagatattttccctggaagtggtaatatccactacaatgagaagttcaagggcaaagccacactgactgcagacaaatcttcgagcacagcctatatgcagctcagtagcctgacatttgaggactctgctgtctatttctgtgcaagactgaggaactgggacgagcctatggactactggggccaagggaccacggtcaccgtctcctcaggtggtggtggttctggcggcggcggctccggtggtggtggttctgagctcgtgatgacacagtctccatcctccctgactgtgacagcaggagagaaggtcactatgagctgcaagtccagtcagagtctgttaaacagtggaaatcaaaagaactacttgacctggtaccagcagaaaccagggcagcctcctaaactgttgatctactgggcatccactagggaatctggggtccctgatcgcttcacaggcagtggatctggaacagatttcactctcaccatcagcagtgtgcaggctgaagacctggcagtttattactgtcagaatgattatagttatccgctcacgttcggtgctgggaccaagcttgagatcaaatccggaggtggtggatccgacgtccaactggtgcagtcaggggctgaagtgaaaaaacctggggcctcagtgaaggtgtcctgcaaggcttctggctacacctttactaggtacacgatgcactgggtaaggcaggcacctggacagggtctggaatggattggatacattaatcctagccgtggttatactaattacaatcagaagttcaaggaccgcgtcacaatcactacagacaaatccaccagcacagcctacatggaactgagcagcctgcgttctgaggacactgcagtctattactgtgcaagatattatgatgatcattactgccttgactactggggccaaggcaccacggtcaccgtctcctcaggcgaaggtactagtactggttctggtggaagtggaggttcaggtggagcagacgacattcagatgacccagtctccatctagcctgtctgcatctgtcggggaccgtgtcaccatcacctgcagagccagtcaaagtgtaagttacatgaactggtaccagcagaagccgggcaaggcacccaaaagatggatttatgacacatccaaagtggcttctggagtccctgctcgcttcagtggcagtgggtctgggaccgactactctctcacaatcaacagcttggaggctgaagatgctgccacttattactgccaacagtggagtagtaacccgctcacgttcggtggcgggaccaaggtggagatcaaa

SEQ ID NO: 261 - protein, 497 aa, artificial sequence
  5-10VH7VL1 HLHL
EVQLLEQSGAELVRPGTSVKISCKASGYAFTNYWLGWVKQRPGHGLEWIGDIFPGSGNIHYNEKFKGKATLTADKSSSTAYMQLSSLTFEDSAVYFCARLRNWDEPMDYWGQGTTVTVSSGGGGSGGGGSGGGGSELVMTQSPSSLTVTAGEKVTMSCKSSQSLLNSGNQKNYLTWYQQKPGQPPKLLIYWASTRESGVPDRFTGSGSGTDFTLTISSVQAEDLAVYYCQNDYSYPLTFGAGTKLEIKSGGGGSDVQLVQSGAEVKKPGASVKVSCKASGYTFTRYTMHWVRQAPGQGLEWIGYINPSRGYTNYNQKFKDRVTITTDKSTSTAYMELSSLRSEDTAVYYCARYYDDHYCLDYWGQGTTVTVSSGEGTSTGSGGSGGSGGADDIQMTQSPSSLSASVGDRVTITCRASQSVSYMNWYQQKPGKAPKRWIYDTSKVASGVPARFSGSGSGTDYSLTINSLEAEDAATYYCQQWSSNPLTFGGGTKVEIK

SEQ ID NO: 262 - DNA, 1488 bp, artificial sequence
  5-10VL1VH7 LHLH
gagctcgtgatgacacagtctccatcctccctgactgtgacagcaggagagaaggtcactatgagctgcaagtccagtcagagtctgttaaacagtggaaatcaaaagaactacttgacctggtaccagcagaaaccagggcagcctcctaaactgttgatctactgggcatccactagggaatctggggtccctgatcgcttcacaggcagtggatctggaacagatttcactctcaccatcagcagtgtgcaggctgaagacctggcagtttattactgtcagaatgattatagttatccgctcacgttcggtgctgggaccaagcttgagatcaaaggtggtggtggttctggcggcggcggctccggtggtggtggttctgaggtgcagctgctcgagcagtctggagctgagctggtaaggcctgggacttcagtgaagatatcctgcaaggcttctggatacgccttcactaactactggctaggttgggtaaagcagaggcctggacatggacttgagtggattggagatattttccctggaagtggtaatatccactacaatgagaagttcaagggcaaagccacactgactgcagacaaatcttcgagcacagcctatatgcagctcagtagcctgacatttgaggactctgctgtctatttctgtgcaagactgaggaactgggacgagcctatggactactggggccaagggaccacggtcaccgtctcctccggaggtggtggatccgacattcagatgacccagtctccatctagcctgtctgcatctgtcggggaccgtgtcaccatcacctgcagagccagtcaaagtgtaagttacatgaactggtaccagcagaagccgggcaaggcacccaaaagatggatttatgacacatccaaagtggcttctggagtccctgctcgcttcagtggcagtgggtctgggaccgactactctctcacaatcaacagcttggaggctgaagatgctgccacttattactgccaacagtggagtagtaacccgctcacgttcggtggcgggaccaaggtggagatcaaaggcgaaggtactagtactggttctggtggaagtggaggttcaggtggagcagacgacgtccaactggtgcagtcaggggctgaagtgaaaaaacctggggcctcagtgaaggtgtcctgcaaggcttctggctacacctttactaggtacacgatgcactgggtaaggcaggcacctggacagggtctggaatggattggatacattaatcctagccgtggttatactaattacaatcagaagttcaaggaccgcgtcacaatcactacagacaaatccaccagcacagcctacatggaactgagcagcctgcgttctgaggacactgcagtctattactgtgcaagatattatgatgatcattactgccttgactactggggccaaggcaccacggtcaccgtctcctca

SEQ ID NO: 263 - protein, 496 aa, artificial sequence
  5-10VL1VH7 LHLH
ELVMTQSPSSLTVTAGEKVTMSCKSSQSLLNSGNQKNYLTWYQQKPGQPPKLLIYWASTRESGVPDRFTGSGSGTDFTLTISSVQAEDLAVYYCQNDYSYPLTFGAGTKLEIKGGGGSGGGGSGGGGSEVQLLEQSGAELVRPGTSVKISCKASGYAFTNYWLGWVKQRPGHGLEWIGDIFPGSGNIHYNEKFKGKATLTADKSSSTAYMQLSSLTFEDSAVYFCARLRNWDEPMDYWGQGTTVTVSSGGGGSDIQMTQSPSSLSASVGDRVTITCRASQSVSYMNWYQQKPGKAPKRWIYDTSKVASGVPARFSGSGSGTDYSLTINSLEAEDAATYYCQQWSSNPLTFGGGTKVEIKGEGTSTGSGGSGGSGGADDVQLVQSGAEVKKPGASVKVSCKASGYTFTRYTMHWVRQAPGQGLEWIGYINPSRGYTNYNQKFKDRVTITTDKSTSTAYMELSSLRSEDTAVYYCARYYDDHYCLDYWGQGTTVTVSS

SEQ ID NO: 264 - DNA, 1491 bp, artificial sequence
  5-10VL1VH7 HLLH
gaggtgcagctgctcgagcagtctggagctgagctggtaaggcctgggacttcagtgaagatatcctgcaaggcttctggatacgccttcactaactactggctaggttgggtaaagcagaggcctggacatggacttgagtggattggagatattttccctggaagtggtaatatccactacaatgagaagttcaagggcaaagccacactgactgcagacaaatcttcgagcacagcctatatgcagctcagtagcctgacatttgaggactctgctgtctatttctgtgcaagactgaggaactgggacgagcctatggactactggggccaagggaccacggtcaccgtctcctcaggtggtggtggttctggcggcggcggctccggtggtggtggttctgagctcgtgatgacacagtctccatcctccctgactgtgacagcaggagagaaggtcactatgagctgcaagtccagtcagagtctgttaaacagtggaaatcaaaagaactacttgacctggtaccagcagaaaccagggcagcctcctaaactgttgatctactgggcatccactagggaatctggggtccctgatcgcttcacaggcagtggatctggaacagatttcactctcaccatcagcagtgtgcaggctgaagacctggcagtttattactgtcagaatgattatagttatccgctcacgttcggtgctgggaccaagcttgagatcaaatccggaggtggtggatccgacattcagatgacccagtctccatctagcctgtctgcatctgtcggggaccgtgtcaccatcacctgcagagccagtcaaagtgtaagttacatgaactggtaccagcagaagccgggcaaggcacccaaaagatggatttatgacacatccaaagtggcttctggagtccctgctcgcttcagtggcagtgggtctgggaccgactactctctcacaatcaacagcttggaggctgaagatgctgccacttattactgccaacagtggagtagtaacccgctcacgttcggtggcgggaccaaggtggagatcaaaggcgaaggtactagtactggttctggtggaagtggaggttcaggtggagcagacgacgtccaactggtgcagtcaggggctgaagtgaaaaaacctggggcctcagtgaaggtgtcctgcaaggcttctggctacacctttactaggtacacgatgcactgggtaaggcaggcacctggacagggtctggaatggattggatacattaatcctagccgtggttatactaattacaatcagaagttcaaggaccgcgtcacaatcactacagacaaatccaccagcacagcctacatggaactgagcagcctgcgttctgaggacactgcagtctattactgtgcaagatattatgatgatcattactgccttgactactggggccaaggcaccacggtcaccgtctcctca

SEQ ID NO: 265 - protein, 497 aa, artificial sequence
  5-10VL1VH7 HLLH
EVQLLEQSGAELVRPGTSVKISCKASGYAFTNYWLGWVKQRPGHGLEWIGDIFPGSGNIHYNEKFKGKATLTADKSSSTAYMQLSSLTFEDSAVYFCARLRNWDEPMDYWGQGTTVTVSSGGGGSGGGGSGGGGSELVMTQSPSSLTVTAGEKVTMSCKSSQSLLNSGNQKNYLTWYQQKPGQPPKLLIYWASTRESGVPDRFTGSGSGTDFTLTISSVQAEDLAVYYCQNDYSYPLTFGAGTKLEIKSGGGGSDIQMTQSPSSLSASVGDRVTITCRASQSVSYMNWYQQKPGKAPKRWIYDTSKVASGVPARFSGSGSGTDYSLTINSLEAEDAATYYCQQWSSNPLTFGGGTKVEIKGEGTSTGSGGSGGSGGADDVQLVQSGAEVKKPGASVKVSCKASGYTFTRYTMHWVRQAPGQGLEWIGYINPSRGYTNYNQKFKDRVTITTDKSTSTAYMELSSLRSEDTAVYYCARYYDDHYCLDYWGQGTTVTVSS

SEQ ID NO: 266 - DNA, 1488 bp, artificial sequence
  5-10/VH7VL2 LHHL
gagctcgtgatgacacagtctccatcctccctgactgtgacagcaggagagaaggtcactatgagctgcaagtccagtcagagtctgttaaacagtggaaatcaaaagaactacttgacctggtaccagcagaaaccagggcagcctcctaaactgttgatctactgggcatccactagggaatctggggtccctgatcgcttcacaggcagtggatctggaacagatttcactctcaccatcagcagtgtgcaggctgaagacctggcagtttattactgtcagaatgattatagttatccgctcacgttcggtgctgggaccaagcttgagatcaaaggtggtggtggttctggcggcggcggctccggtggtggtggttctgaggtgcagctgctcgagcagtctggagctgagctggtaaggcctgggacttcagtgaagatatcctgcaaggcttctggatacgccttcactaactactggctaggttgggtaaagcagaggcctggacatggacttgagtggattggagatattttccctggaagtggtaatatccactacaatgagaagttcaagggcaaagccacactgactgcagacaaatcttcgagcacagcctatatgcagctcagtagcctgacatttgaggactctgctgtctatttctgtgcaagactgaggaactgggacgagcctatggactactggggccaagggaccacggtcaccgtctcctccggaggtggtggatccgacgtccaactggtgcagtcaggggctgaagtgaaaaaacctggggcctcagtgaaggtgtcctgcaaggcttctggctacacctttactaggtacacgatgcactgggtaaggcaggcacctggacagggtctggaatggattggatacattaatcctagccgtggttatactaattacaatcagaagttcaaggaccgcgtcacaatcactacagacaaatccaccagcacagcctacatggaactgagcagcctgcgttctgaggacactgcagtctattactgtgcaagatattatgatgatcattactgccttgactactggggccaaggcaccacggtcaccgtctcctcaggcgaaggtactagtactggttctggtggaagtggaggttcaggtggagcagacgacattgtactgacccagtctccagcaactctgtctctgtctccaggggagcgtgccaccctgagctgcagagccagtcaaagtgtaagttacatgaactggtaccagcagaagccgggcaaggcacccaaaagatggatttatgacacatccaaagtggcttctggagtccctgctcgcttcagtggcagtgggtctgggaccgactactctctcacaatcaacagcttggaggctgaagatgctgccacttattactgccaacagtggagtagtaacccgctcacgttcggtggcgggaccaaggtggagatcaaa

SEQ ID NO: 267 - protein, 496 aa, artificial sequence
  5-10/VH7VL2 LHHL
ELVMTQSPSSLTVTAGEKVTMSCKSSQSLLNSGNQKNYLTWYQQKPGQPPKLLIYWASTRESGVPDRFTGSGSGTDFTLTISSVQAEDLAVYYCQNDYSYPLTFGAGTKLEIKGGGGSGGGGSGGGGSEVQLLEQSGAELVRPGTSVKISCKASGYAFTNYWLGWVKQRPGHGLEWIGDIFPGSGNIHYNEKFKGKATLTADKSSSTAYMQLSSLTFEDSAVYFCARLRNWDEPMDYWGQGTTVTVSSGGGGSDVQLVQSGAEVKKPGASVKVSCKASGYTFTRYTMHWVRQAPGQGLEWIGYINPSRGYTNYNQKFKDRVTITTDKSTSTAYMELSSLRSEDTAVYYCARYYDDHYCLDYWGQGTTVTVSSGEGTSTGSGGSGGSGGADDIVLTQSPATLSLSPGERATLSCRASQSVSYMNWYQQKPGKAPKRWIYDTSKVASGVPARFSGSGSGTDYSLTINSLEAEDAATYYCQQWSSNPLTFGGGTKVEIK

SEQ ID NO: 268 - DNA, 1491 bp, artificial sequence
  5-10/VH7VL2 HLHL
gaggtgcagctgctcgagcagtctggagctgagctggtaaggcctgggacttcagtgaagatatcctgcaaggcttctggatacgccttcactaactactggctaggttgggtaaagcagaggcctggacatggacttgagtggattggagatattttccctggaagtggtaatatccactacaatgagaagttcaagggcaaagccacactgactgcagacaaatcttcgagcacagcctatatgcagctcagtagcctgacatttgaggactctgctgtctatttctgtgcaagactgaggaactgggacgagcctatggactactggggccaagggaccacggtcaccgtctcctcaggtggtggtggttctggcggcggcggctccggtggtggtggttctgagctcgtgatgacacagtctccatcctccctgactgtgacagcaggagagaaggtcactatgagctgcaagtccagtcagagtctgttaaacagtggaaatcaaaagaactacttgacctggtaccagcagaaaccagggcagcctcctaaactgttgatctactgggcatccactagggaatctggggtccctgatcgcttcacaggcagtggatctggaacagatttcactctcaccatcagcagtgtgcaggctgaagacctggcagtttattactgtcagaatgattatagttatccgctcacgttcggtgctgggaccaagcttgagatcaaatccggaggtggtggatccgacgtccaactggtgcagtcaggggctgaagtgaaaaaacctggggcctcagtgaaggtgtcctgcaaggcttctggctacacctttactaggtacacgatgcactgggtaaggcaggcacctggacagggtctggaatggattggatacattaatcctagccgtggttatactaattacaatcagaagttcaaggaccgcgtcacaatcactacagacaaatccaccagcacagcctacatggaactgagcagcctgcgttctgaggacactgcagtctattactgtgcaagatattatgatgatcattactgccttgactactggggccaaggcaccacggtcaccgtctcctcaggcgaaggtactagtactggttctggtggaagtggaggttcaggtggagcagacgacattgtactgacccagtctccagcaactctgtctctgtctccaggggagcgtgccaccctgagctgcagagccagtcaaagtgtaagttacatgaactggtaccagcagaagccgggcaaggcacccaaaagatggatttatgacacatccaaagtggcttctggagtccctgctcgcttcagtggcagtgggtctgggaccgactactctctcacaatcaacagcttggaggctgaagatgctgccacttattactgccaacagtggagtagtaacccgctcacgttcggtggcgggaccaaggtggagatcaaa

SEQ ID NO: 269 - protein, 497 aa, artificial sequence
  5-10/VH7VL2 HLHL
EVQLLEQSGAELVRPGTSVKISCKASGYAFTNYWLGWVKQRPGHGLEWIGDIFPGSGNIHYNEKFKGKATLTADKSSSTAYMQLSSLTFEDSAVYFCARLRNWDEPMDYWGQGTTVTVSSGGGGSGGGGSGGGGSELVMTQSPSSLTVTAGEKVTMSCKSSQSLLNSGNQKNYLTWYQQKPGQPPKLLIYWASTRESGVPDRFTGSGSGTDFTLTISSVQAEDLAVYYCQNDYSYPLTFGAGTKLEIKSGGGGSDVQLVQSGAEVKKPGASVKVSCKASGYTFTRYTMHWVRQAPGQGLEWIGYINPSRGYTNYNQKFKDRVTITTDKSTSTAYMELSSLRSEDTAVYYCARYYDDHYCLDYWGQGTTVTVSSGEGTSTGSGGSGGSGGADDIVLTQSPATLSLSPGERATLSCRASQSVSYMNWYQQKPGKAPKRWIYDTSKVASGVPARFSGSGSGTDYSLTINSLEAEDAATYYCQQWSSNPLTFGGGTKVEIK

SEQ ID NO: 270 - DNA, 1488 bp, artificial sequence
  5-10/VL2VH7 LHLH
gagctcgtgatgacacagtctccatcctccctgactgtgacagcaggagagaaggtcactatgagctgcaagtccagtcagagtctgttaaacagtggaaatcaaaagaactacttgacctggtaccagcagaaaccagggcagcctcctaaactgttgatctactgggcatccactagggaatctggggtccctgatcgcttcacaggcagtggatctggaacagatttcactctcaccatcagcagtgtgcaggctgaagacctggcagtttattactgtcagaatgattatagttatccgctcacgttcggtgctgggaccaagcttgagatcaaaggtggtggtggttctggcggcggcggctccggtggtggtggttctgaggtgcagctgctcgagcagtctggagctgagctggtaaggcctgggacttcagtgaagatatcctgcaaggcttctggatacgccttcactaactactggctaggttgggtaaagcagaggcctggacatggacttgagtggattggagatattttccctggaagtggtaatatccactacaatgagaagttcaagggcaaagccacactgactgcagacaaatcttcgagcacagcctatatgcagctcagtagcctgacatttgaggactctgctgtctatttctgtgcaagactgaggaactgggacgagcctatggactactggggccaagggaccacggtcaccgtctcctccggaggtggtggatccgacattgtactgacccagtctccagcaactctgtctctgtctccaggggagcgtgccaccctgagctgcagagccagtcaaagtgtaagttacatgaactggtaccagcagaagccgggcaaggcacccaaaagatggatttatgacacatccaaagtggcttctggagtccctgctcgcttcagtggcagtgggtctgggaccgactactctctcacaatcaacagcttggaggctgaagatgctgccacttattactgccaacagtggagtagtaacccgctcacgttcggtggcgggaccaaggtggagatcaaaggcgaaggtactagtactggttctggtggaagtggaggttcaggtggagcagacgacgtccaactggtgcagtcaggggctgaagtgaaaaaacctggggcctcagtgaaggtgtcctgcaaggcttctggctacacctttactaggtacacgatgcactgggtaaggcaggcacctggacagggtctggaatggattggatacattaatcctagccgtggttatactaattacaatcagaagttcaaggaccgcgtcacaatcactacagacaaatccaccagcacagcctacatggaactgagcagcctgcgttctgaggacactgcagtctattactgtgcaagatattatgatgatcattactgccttgactactggggccaaggcaccacggtcaccgtctcctca

SEQ ID NO: 271 - protein, 496 aa, artificial sequence
  5-10/VL2VH7 LHLH
ELVMTQSPSSLTVTAGEKVTMSCKSSQSLLNSGNQKNYLTWYQQKPGQPPKLLIYWASTRESGVPDRFTGSGSGTDFTLTISSVQAEDLAVYYCQNDYSYPLTFGAGTKLEIKGGGGSGGGGSGGGGSEVQLLEQSGAELVRPGTSVKISCKASGYAFTNYWLGWVKQRPGHGLEWIGDIFPGSGNIHYNEKFKGKATLTADKSSSTAYMQLSSLTFEDSAVYFCARLRNWDEPMDYWGQGTTVTVSSGGGGSDIVLTQSPATLSLSPGERATLSCRASQSVSYMNWYQQKPGKAPKRWIYDTSKVASGVPARFSGSGSGTDYSLTINSLEAEDAATYYCQQWSSNPLTFGGGTKVEIKGEGTSTGSGGSGGSGGADDVQLVQSGAEVKKPGASVKVSCKASGYTFTRYTMHWVRQAPGQGLEWIGYINPSRGYTNYNQKFKDRVTITTDKSTSTAYMELSSLRSEDTAVYYCARYYDDHYCLDYWGQGTTVTVSS

SEQ ID NO: 272 - DNA, 1491 bp, artificial sequence
  5-10/VL2VH7 HLLH
gaggtgcagctgctcgagcagtctggagctgagctggtaaggcctgggacttcagtgaagatatcctgcaaggcttctggatacgccttcactaactactggctaggttgggtaaagcagaggcctggacatggacttgagtggattggagatattttccctggaagtggtaatatccactacaatgagaagttcaagggcaaagccacactgactgcagacaaatcttcgagcacagcctatatgcagctcagtagcctgacatttgaggactctgctgtctatttctgtgcaagactgaggaactgggacgagcctatggactactggggccaagggaccacggtcaccgtctcctcaggtggtggtggttctggcggcggcggctccggtggtggtggttctgagctcgtgatgacacagtctccatcctccctgactgtgacagcaggagagaaggtcactatgagctgcaagtccagtcagagtctgttaaacagtggaaatcaaaagaactacttgacctggtaccagcagaaaccagggcagcctcctaaactgttgatctactgggcatccactagggaatctggggtccctgatcgcttcacaggcagtggatctggaacagatttcactctcaccatcagcagtgtgcaggctgaagacctggcagtttattactgtcagaatgattatagttatccgctcacgttcggtgctgggaccaagcttgagatcaaatccggaggtggtggatccgacattgtactgacccagtctccagcaactctgtctctgtctccaggggagcgtgccaccctgagctgcagagccagtcaaagtgtaagttacatgaactggtaccagcagaagccgggcaaggcacccaaaagatggatttatgacacatccaaagtggcttctggagtccctgctcgcttcagtggcagtgggtctgggaccgactactctctcacaatcaacagcttggaggctgaagatgctgccacttattactgccaacagtggagtagtaacccgctcacgttcggtggcgggaccaaggtggagatcaaaggcgaaggtactagtactggttctggtggaagtggaggttcaggtggagcagacgacgtccaactggtgcagtcaggggctgaagtgaaaaaacctggggcctcagtgaaggtgtcctgcaaggcttctggctacacctttactaggtacacgatgcactgggtaaggcaggcacctggacagggtctggaatggattggatacattaatcctagccgtggttatactaattacaatcagaagttcaaggaccgcgtcacaatcactacagacaaatccaccagcacagcctacatggaactgagcagcctgcgttctgaggacactgcagtctattactgtgcaagatattatgatgatcattactgccttgactactggggccaaggcaccacggtcaccgtctcctca

SEQ ID NO: 273 - protein, 497 aa, artificial sequence
  5-10/VL2VH7 HLLH
EVQLLEQSGAELVRPGTSVKISCKASGYAFTNYWLGWVKQRPGHGLEWIGDIFPGSGNIHYNEKFKGKATLTADKSSSTAYMQLSSLTFEDSAVYFCARLRNWDEPMDYWGQGTTVTVSSGGGGSGGGGSGGGGSELVMTQSPSSLTVTAGEKVTMSCKSSQSLLNSGNQKNYLTWYQQKPGQPPKLLIYWASTRESGVPDRFTGSGSGTDFTLTISSVQAEDLAVYYCQNDYSYPLTFGAGTKLEIKSGGGGSDIVLTQSPATLSLSPGERATLSCRASQSVSYMNWYQQKPGKAPKRWIYDTSKVASGVPARFSGSGSGTDYSLTINSLEAEDAATYYCQQWSSNPLTFGGGTKVEIKGEGTSTGSGGSGGSGGADDVQLVQSGAEVKKPGASVKVSCKASGYTFTRYTMHWVRQAPGQGLEWIGYINPSRGYTNYNQKFKDRVTITTDKSTSTAYMELSSLRSEDTAVYYCARYYDDHYCLDYWGQGTTVTVSS

SEQ ID NO: 274 - DNA, 1488 bp, artificial sequence
  5-10/VH7VL3 LHHL
gagctcgtgatgacacagtctccatcctccctgactgtgacagcaggagagaaggtcactatgagctgcaagtccagtcagagtctgttaaacagtggaaatcaaaagaactacttgacctggtaccagcagaaaccagggcagcctcctaaactgttgatctactgggcatccactagggaatctggggtccctgatcgcttcacaggcagtggatctggaacagatttcactctcaccatcagcagtgtgcaggctgaagacctggcagtttattactgtcagaatgattatagttatccgctcacgttcggtgctgggaccaagcttgagatcaaaggtggtggtggttctggcggcggcggctccggtggtggtggttctgaggtgcagctgctcgagcagtctggagctgagctggtaaggcctgggacttcagtgaagatatcctgcaaggcttctggatacgccttcactaactactggctaggttgggtaaagcagaggcctggacatggacttgagtggattggagatattttccctggaagtggtaatatccactacaatgagaagttcaagggcaaagccacactgactgcagacaaatcttcgagcacagcctatatgcagctcagtagcctgacatttgaggactctgctgtctatttctgtgcaagactgaggaactgggacgagcctatggactactggggccaagggaccacggtcaccgtctcctccggaggtggtggatccgacgtccaactggtgcagtcaggggctgaagtgaaaaaacctggggcctcagtgaaggtgtcctgcaaggcttctggctacacctttactaggtacacgatgcactgggtaaggcaggcacctggacagggtctggaatggattggatacattaatcctagccgtggttatactaattacaatcagaagttcaaggaccgcgtcacaatcactacagacaaatccaccagcacagcctacatggaactgagcagcctgcgttctgaggacactgcagtctattactgtgcaagatattatgatgatcattactgccttgactactggggccaaggcaccacggtcaccgtctcctcaggcgaaggtactagtactggttctggtggaagtggaggttcaggtggagcagacgacattgtactgacccagtctccagcaactctgtctctgtctccaggggagcgtgccaccctgacctgcagagccagttcaagtgtaagttacatgaactggtaccagcagaagccgggcaaggcacccaaaagatggatttatgacacatccaaagtggcttctggagtccctgctcgcttcagtggcagtgggtctgggaccgactactctctcacaatcaacagcttggaggctgaagatgctgccacttattactgccaacagtggagtagtaacccgctcacgttcggtggcgggaccaaggtggagatcaaa

SEQ ID NO: 275 - protein, 496 aa, artificial sequence
  5-10/VH7VL3 LHHL
ELVMTQSPSSLTVTAGEKVTMSCKSSQSLLNSGNQKNYLTWYQQKPGQPPKLLIYWASTRESGVPDRFTGSGSGTDFTLTISSVQAEDLAVYYCQNDYSYPLTFGAGTKLEIKGGGGSGGGGSGGGGSEVQLLEQSGAELVRPGTSVKISCKASGYAFTNYWLGWVKQRPGHGLEWIGDIFPGSGNIHYNEKFKGKATLTADKSSSTAYMQLSSLTFEDSAVYFCARLRNWDEPMDYWGQGTTVTVSSGGGGSDVQLVQSGAEVKKPGASVKVSCKASGYTFTRYTMHWVRQAPGQGLEWIGYINPSRGYTNYNQKFKDRVTITTDKSTSTAYMELSSLRSEDTAVYYCARYYDDHYCLDYWGQGTTVTVSSGEGTSTGSGGSGGSGGADDIVLTQSPATLSLSPGERATLTCRASSSVSYMNWYQQKPGKAPKRWIYDTSKVASGVPARFSGSGSGTDYSLTINSLEAEDAATYYCQQWSSNPLTFGGGTKVEIK

SEQ ID NO: 276 - DNA, 1491 bp, artificial sequence
  5-10/VH7VL3 HLHL
gaggtgcagctgctcgagcagtctggagctgagctggtaaggcctgggacttcagtgaagatatcctgcaaggcttctggatacgccttcactaactactggctaggttgggtaaagcagaggcctggacatggacttgagtggattggagatattttccctggaagtggtaatatccactacaatgagaagttcaagggcaaagccacactgactgcagacaaatcttcgagcacagcctatatgcagctcagtagcctgacatttgaggactctgctgtctatttctgtgcaagactgaggaactgggacgagcctatggactactggggccaagggaccacggtcaccgtctcctcaggtggtggtggttctggcggcggcggctccggtggtggtggttctgagctcgtgatgacacagtctccatcctccctgactgtgacagcaggagagaaggtcactatgagctgcaagtccagtcagagtctgttaaacagtggaaatcaaaagaactacttgacctggtaccagcagaaaccagggcagcctcctaaactgttgatctactgggcatccactagggaatctggggtccctgatcgcttcacaggcagtggatctggaacagatttcactctcaccatcagcagtgtgcaggctgaagacctggcagtttattactgtcagaatgattatagttatccgctcacgttcggtgctgggaccaagcttgagatcaaatccggaggtggtggatccgacgtccaactggtgcagtcaggggctgaagtgaaaaaacctggggcctcagtgaaggtgtcctgcaaggcttctggctacacctttactaggtacacgatgcactgggtaaggcaggcacctggacagggtctggaatggattggatacattaatcctagccgtggttatactaattacaatcagaagttcaaggaccgcgtcacaatcactacagacaaatccaccagcacagcctacatggaactgagcagcctgcgttctgaggacactgcagtctattactgtgcaagatattatgatgatcattactgccttgactactggggccaaggcaccacggtcaccgtctcctcaggcgaaggtactagtactggttctggtggaagtggaggttcaggtggagcagacgacattgtactgacccagtctccagcaactctgtctctgtctccaggggagcgtgccaccctgacctgcagagccagttcaagtgtaagttacatgaactggtaccagcagaagccgggcaaggcacccaaaagatggatttatgacacatccaaagtggcttctggagtccctgctcgcttcagtggcagtgggtctgggaccgactactctctcacaatcaacagcttggaggctgaagatgctgccacttattactgccaacagtggagtagtaacccgctcacgttcggtggcgggaccaaggtggagatcaaa

SEQ ID NO: 277 - protein, 497 aa, artificial sequence
  5-10/VH7VL3 HLHL
EVQLLEQSGAELVRPGTSVKISCKASGYAFTNYWLGWVKQRPGHGLEWIGDIFPGSGNIHYNEKFKGKATLTADKSSSTAYMQLSSLTFEDSAVYFCARLRNWDEPMDYWGQGTTVTVSSGGGGSGGGGSGGGGSELVMTQSPSSLTVTAGEKVTMSCKSSQSLLNSGNQKNYLTWYQQKPGQPPKLLIYWASTRESGVPDRFTGSGSGTDFTLTISSVQAEDLAVYYCQNDYSYPLTFGAGTKLEIKSGGGGSDVQLVQSGAEVKKPGASVKVSCKASGYTFTRYTMHWVRQAPGQGLEWIGYINPSRGYTNYNQKFKDRVTITTDKSTSTAYMELSSLRSEDTAVYYCARYYDDHYCLDYWGQGTTVTVSSGEGTSTGSGGSGGSGGADDIVLTQSPATLSLSPGERATLTCRASSSVSYMNWYQQKPGKAPKRWIYDTSKVASGVPARFSGSGSGTDYSLTINSLEAEDAATYYCQQWSSNPLTFGGGTKVEIK

SEQ ID NO: 278 - DNA, 1488 bp, artificial sequence
  5-10/VL3VH7 LHLH
gagctcgtgatgacacagtctccatcctccctgactgtgacagcaggagagaaggtcactatgagctgcaagtccagtcagagtctgttaaacagtggaaatcaaaagaactacttgacctggtaccagcagaaaccagggcagcctcctaaactgttgatctactgggcatccactagggaatctggggtccctgatcgcttcacaggcagtggatctggaacagatttcactctcaccatcagcagtgtgcaggctgaagacctggcagtttattactgtcagaatgattatagttatccgctcacgttcggtgctgggaccaagcttgagatcaaaggtggtggtggttctggcggcggcggctccggtggtggtggttctgaggtgcagctgctcgagcagtctggagctgagctggtaaggcctgggacttcagtgaagatatcctgcaaggcttctggatacgccttcactaactactggctaggttgggtaaagcagaggcctggacatggacttgagtggattggagatattttccctggaagtggtaatatccactacaatgagaagttcaagggcaaagccacactgactgcagacaaatcttcgagcacagcctatatgcagctcagtagcctgacatttgaggactctgctgtctatttctgtgcaagactgaggaactgggacgagcctatggactactggggccaagggaccacggtcaccgtctcctccggaggtggtggatccgacattgtactgacccagtctccagcaactctgtctctgtctccaggggagcgtgccaccctgacctgcagagccagttcaagtgtaagttacatgaactggtaccagcagaagccgggcaaggcacccaaaagatggatttatgacacatccaaagtggcttctggagtccctgctcgcttcagtggcagtgggtctgggaccgactactctctcacaatcaacagcttggaggctgaagatgctgccacttattactgccaacagtggagtagtaacccgctcacgttcggtggcgggaccaaggtggagatcaaaggcgaaggtactagtactggttctggtggaagtggaggttcaggtggagcagacgacgtccaactggtgcagtcaggggctgaagtgaaaaaacctggggcctcagtgaaggtgtcctgcaaggcttctggctacacctttactaggtacacgatgcactgggtaaggcaggcacctggacagggtctggaatggattggatacattaatcctagccgtggttatactaattacaatcagaagttcaaggaccgcgtcacaatcactacagacaaatccaccagcacagcctacatggaactgagcagcctgcgttctgaggacactgcagtctattactgtgcaagatattatgatgatcattactgccttgactactggggccaaggcaccacggtcaccgtctcctca

SEQ ID NO: 279 - protein, 496 aa, artificial sequence
  5-10/VL3VH7 LHLH
ELVMTQSPSSLTVTAGEKVTMSCKSSQSLLNSGNQKNYLTWYQQKPGQPPKLLIYWASTRESGVPDRFTGSGSGTDFTLTISSVQAEDLAVYYCQNDYSYPLTFGAGTKLEIKGGGGSGGGGSGGGGSEVQLLEQSGAELVRPGTSVKISCKASGYAFTNYWLGWVKQRPGHGLEWIGDIFPGSGNIHYNEKFKGKATLTADKSSSTAYMQLSSLTFEDSAVYFCARLRNWDEPMDYWGQGTTVTVSSGGGGSDIVLTQSPATLSLSPGERATLTCRASSSVSYMNWYQQKPGKAPKRWIYDTSKVASGVPARFSGSGSGTDYSLTINSLEAEDAATYYCQQWSSNPLTFGGGTKVEIKGEGTSTGSGGSGGSGGADDVQLVQSGAEVKKPGASVKVSCKASGYTFTRYTMHWVRQAPGQGLEWIGYINPSRGYTNYNQKFKDRVTITTDKSTSTAYMELSSLRSEDTAVYYCARYYDDHYCLDYWGQGTTVTVSS

SEQ ID NO: 280 - DNA, 1491 bp, artificial sequence
  5-10/VL3VH7 HLLH
gaggtgcagctgctcgagcagtctggagctgagctggtaaggcctgggacttcagtgaagatatcctgcaaggcttctggatacgccttcactaactactggctaggttgggtaaagcagaggcctggacatggacttgagtggattggagatattttccctggaagtggtaatatccactacaatgagaagttcaagggcaaagccacactgactgcagacaaatcttcgagcacagcctatatgcagctcagtagcctgacatttgaggactctgctgtctatttctgtgcaagactgaggaactgggacgagcctatggactactggggccaagggaccacggtcaccgtctcctcaggtggtggtggttctggcggcggcggctccggtggtggtggttctgagctcgtgatgacacagtctccatcctccctgactgtgacagcaggagagaaggtcactatgagctgcaagtccagtcagagtctgttaaacagtggaaatcaaaagaactacttgacctggtaccagcagaaaccagggcagcctcctaaactgttgatctactgggcatccactagggaatctggggtccctgatcgcttcacaggcagtggatctggaacagatttcactctcaccatcagcagtgtgcaggctgaagacctggcagtttattactgtcagaatgattatagttatccgctcacgttcggtgctgggaccaagcttgagatcaaatccggaggtggtggatccgacattgtactgacccagtctccagcaactctgtctctgtctccaggggagcgtgccaccctgacctgcagagccagttcaagtgtaagttacatgaactggtaccagcagaagccgggcaaggcacccaaaagatggatttatgacacatccaaagtggcttctggagtccctgctcgcttcagtggcagtgggtctgggaccgactactctctcacaatcaacagcttggaggctgaagatgctgccacttattactgccaacagtggagtagtaacccgctcacgttcggtggcgggaccaaggtggagatcaaaggcgaaggtactagtactggttctggtggaagtggaggttcaggtggagcagacgacgtccaactggtgcagtcaggggctgaagtgaaaaaacctggggcctcagtgaaggtgtcctgcaaggcttctggctacacctttactaggtacacgatgcactgggtaaggcaggcacctggacagggtctggaatggattggatacattaatcctagccgtggttatactaattacaatcagaagttcaaggaccgcgtcacaatcactacagacaaatccaccagcacagcctacatggaactgagcagcctgcgttctgaggacactgcagtctattactgtgcaagatattatgatgatcattactgccttgactactggggccaaggcaccacggtcaccgtctcctca

SEQ ID NO: 281 - protein, 497 aa, artificial sequence
  5-10/VL3VH7 HLLH
EVQLLEQSGAELVRPGTSVKISCKASGYAFTNYWLGWVKQRPGHGLEWIGDIFPGSGNIHYNEKFKGKATLTADKSSSTAYMQLSSLTFEDSAVYFCARLRNWDEPMDYWGQGTTVTVSSGGGGSGGGGSGGGGSELVMTQSPSSLTVTAGEKVTMSCKSSQSLLNSGNQKNYLTWYQQKPGQPPKLLIYWASTRESGVPDRFTGSGSGTDFTLTISSVQAEDLAVYYCQNDYSYPLTFGAGTKLEIKSGGGGSDIVLTQSPATLSLSPGERATLTCRASSSVSYMNWYQQKPGKAPKRWIYDTSKVASGVPARFSGSGSGTDYSLTINSLEAEDAATYYCQQWSSNPLTFGGGTKVEIKGEGTSTGSGGSGGSGGADDVQLVQSGAEVKKPGASVKVSCKASGYTFTRYTMHWVRQAPGQGLEWIGYINPSRGYTNYNQKFKDRVTITTDKSTSTAYMELSSLRSEDTAVYYCARYYDDHYCLDYWGQGTTVTVSS

SEQ ID NO: 282 - DNA, 1497 bp, artificial sequence
  VL1/VH5x4-7 LHHL
gacattcagatgacccagtctccatctagcctgtctgcatctgtcggggaccgtgtcaccatcacctgcagagccagtcaaagtgtaagttacatgaactggtaccagcagaagccgggcaaggcacccaaaagatggatttatgacacatccaaagtggcttctggagtccctgctcgcttcagtggcagtgggtctgggaccgactactctctcacaatcaacagcttggaggctgaagatgctgccacttattactgccaacagtggagtagtaacccgctcacgttcggtggcgggaccaaggtggagatcaaaggcgaaggtactagtactggttctggtggaagtggaggttcaggtggagcagacgacgtccaactggtgcagtcaggggctgaagtgaaaaaacctggggcctcagtgaaggtgtcctgcaaggcttctggctacacctttactaggtacacgatgcactgggtaaggcaggcacctggacagggtctggaatggattggatacattaatcctagccgtggttatactaattacgcagacagcgtcaagggccgcttcacaatcactacagacaaatccaccagcacagcctacatggaactgagcagcctgcgttctgaggacactgcaacctattactgtgcaagatattatgatgatcattactgccttgactactggggccaaggcaccacggtcaccgtctcctccggaggtggtggatccgaggtgcagctgctcgagcagtctggagctgagctggcgaggcctggggcttcagtgaagctgtcctgcaaggcttctggctacaccttcacaaactatggtttaagctgggtgaagcagaggcctggacaggtccttgagtggattggagaggtttatcctagaattggtaatgcttactacaatgagaagttcaagggcaaggccacactgactgcagacaaatcctccagcacagcgtccatggagctccgcagcctgacctctgaggactctgcggtctatttctgtgcaagacggggatcctacgatactaactacgactggtacttcgatgtctggggccaagggaccacggtcaccgtctcctcaggtggtggtggttctggcggcggcggctccggtggtggtggttctgagctcgtgatgacccagactccactctccctgcctgtcagtcttggagatcaagcctccatctcttgcagatctagtcagagccttgtacacagtaatggaaacacctatttacattggtacctgcagaagccaggccagtctccaaagctcctgatctacaaagtttccaaccgattttctggggtcccagacaggttcagtggcagtggatcagggacagatttcacactcaagatcagcagagtggaggctgaggatctgggagtttatttctgctctcaaagtacacatgttccgtacacgttcggaggggggaccaagcttgagatcaaa

SEQ ID NO: 283 - protein, 499 aa, artificial sequence
  VL1/VH5x4-7 LHHL
DIQMTQSPSSLSASVGDRVTITCRASQSVSYMNWYQQKPGKAPKRWIYDTSKVASGVPARFSGSGSGTDYSLTINSLEAEDAATYYCQQWSSNPLTFGGGTKVEIKGEGTSTGSGGSGGSGGADDVQLVQSGAEVKKPGASVKVSCKASGYTFTRYTMHWVRQAPGQGLEWIGYINPSRGYTNYADSVKGRFTITTDKSTSTAYMELSSLRSEDTATYYCARYYDDHYCLDYWGQGTTVTVSSGGGGSEVQLLEQSGAELARPGASVKLSCKASGYTFTNYGLSWVKQRPGQVLEWIGEVYPRIGNAYYNEKFKGKATLTADKSSSTASMELRSLTSEDSAVYFCARRGSYDTNYDWYFDVWGQGTTVTVSSGGGGSGGGGSGGGGSELVMTQTPLSLPVSLGDQASISCRSSQSLVHSNGNTYLHWYLQKPGQSPKLLIYKVSNRFSGVPDRFSGSGSGTDFTLKISRVEAEDLGVYFCSQSTHVPYTFGGGTKLEIK

SEQ ID NO: 284 - DNA, 1500 bp, artificial sequence
  VH5/VL1x4-7 HLHL
gacgtccaactggtgcagtcaggggctgaagtgaaaaaacctggggcctcagtgaaggtgtcctgcaaggcttctggctacacctttactaggtacacgatgcactgggtaaggcaggcacctggacagggtctggaatggattggatacattaatcctagccgtggttatactaattacgcagacagcgtcaagggccgcttcacaatcactacagacaaatccaccagcacagcctacatggaactgagcagcctgcgttctgaggacactgcaacctattactgtgcaagatattatgatgatcattactgccttgactactggggccaaggcaccacggtcaccgtctcctcaggcgaaggtactagtactggttctggtggaagtggaggttcaggtggagcagacgacattcagatgacccagtctccatctagcctgtctgcatctgtcggggaccgtgtcaccatcacctgcagagccagtcaaagtgtaagttacatgaactggtaccagcagaagccgggcaaggcacccaaaagatggatttatgacacatccaaagtggcttctggagtccctgctcgcttcagtggcagtgggtctgggaccgactactctctcacaatcaacagcttggaggctgaagatgctgccacttattactgccaacagtggagtagtaacccgctcacgttcggtggcgggaccaaggtggagatcaaatccggaggtggtggatccgaggtgcagctgctcgagcagtctggagctgagctggcgaggcctggggcttcagtgaagctgtcctgcaaggcttctggctacaccttcacaaactatggtttaagctgggtgaagcagaggcctggacaggtccttgagtggattggagaggtttatcctagaattggtaatgcttactacaatgagaagttcaagggcaaggccacactgactgcagacaaatcctccagcacagcgtccatggagctccgcagcctgacctctgaggactctgcggtctatttctgtgcaagacggggatcctacgatactaactacgactggtacttcgatgtctggggccaagggaccacggtcaccgtctcctcaggtggtggtggttctggcggcggcggctccggtggtggtggttctgagctcgtgatgacccagactccactctccctgcctgtcagtcttggagatcaagcctccatctcttgcagatctagtcagagccttgtacacagtaatggaaacacctatttacattggtacctgcagaagccaggccagtctccaaagctcctgatctacaaagtttccaaccgattttctggggtcccagacaggttcagtggcagtggatcagggacagatttcacactcaagatcagcagagtggaggctgaggatctgggagtttatttctgctctcaaagtacacatgttccgtacacgttcggaggggggaccaagcttgagatcaaa

SEQ ID NO: 285 - protein, 500 aa, artificial sequence
  VH5/VL1x4-7 HLHL
DVQLVQSGAEVKKPGASVKVSCKASGYTFTRYTMHWVRQAPGQGLEWIGYINPSRGYTNYADSVKGRFTITTDKSTSTAYMELSSLRSEDTATYYCARYYDDHYCLDYWGQGTTVTVSSGEGTSTGSGGSGGSGGADDIQMTQSPSSLSASVGDRVTITCRASQSVSYMNWYQQKPGKAPKRWIYDTSKVASGVPARFSGSGSGTDYSLTINSLEAEDAATYYCQQWSSNPLTFGGGTKVEIKSGGGGSEVQLLEQSGAELARPGASVKLSCKASGYTFTNYGLSWVKQRPGQVLEWIGEVYPRIGNAYYNEKFKGKATLTADKSSSTASMELRSLTSEDSAVYFCARRGSYDTNYDWYFDVWGQGTTVTVSSGGGGSGGGGSGGGGSELVMTQTPLSLPVSLGDQASISCRSSQSLVHSNGNTYLHWYLQKPGQSPKLLIYKVSNRFSGVPDRFSGSGSGTDFTLKISRVEAEDLGVYFCSQSTHVPYTFGGGTKLEIK

SEQ ID NO: 286 - DNA, 1497 bp, artificial sequence
  VL1/VH5x4-7 LHLH
gacattcagatgacccagtctccatctagcctgtctgcatctgtcggggaccgtgtcaccatcacctgcagagccagtcaaagtgtaagttacatgaactggtaccagcagaagccgggcaaggcacccaaaagatggatttatgacacatccaaagtggcttctggagtccctgctcgcttcagtggcagtgggtctgggaccgactactctctcacaatcaacagcttggaggctgaagatgctgccacttattactgccaacagtggagtagtaacccgctcacgttcggtggcgggaccaaggtggagatcaaaggcgaaggtactagtactggttctggtggaagtggaggttcaggtggagcagacgacgtccaactggtgcagtcaggggctgaagtgaaaaaacctggggcctcagtgaaggtgtcctgcaaggcttctggctacacctttactaggtacacgatgcactgggtaaggcaggcacctggacagggtctggaatggattggatacattaatcctagccgtggttatactaattacgcagacagcgtcaagggccgcttcacaatcactacagacaaatccaccagcacagcctacatggaactgagcagcctgcgttctgaggacactgcaacctattactgtgcaagatattatgatgatcattactgccttgactactggggccaaggcaccacggtcaccgtctcctccggaggtggtggatccgagctcgtgatgacccagactccactctccctgcctgtcagtcttggagatcaagcctccatctcttgcagatctagtcagagccttgtacacagtaatggaaacacctatttacattggtacctgcagaagccaggccagtctccaaagctcctgatctacaaagtttccaaccgattttctggggtcccagacaggttcagtggcagtggatcagggacagatttcacactcaagatcagcagagtggaggctgaggatctgggagtttatttctgctctcaaagtacacatgttccgtacacgttcggaggggggaccaagcttgagatcaaaggtggtggtggttctggcggcggcggctccggtggtggtggttctgaggtgcagctgctcgagcagtctggagctgagctggcgaggcctggggcttcagtgaagctgtcctgcaaggcttctggctacaccttcacaaactatggtttaagctgggtgaagcagaggcctggacaggtccttgagtggattggagaggtttatcctagaattggtaatgcttactacaatgagaagttcaagggcaaggccacactgactgcagacaaatcctccagcacagcgtccatggagctccgcagcctgacctctgaggactctgcggtctatttctgtgcaagacggggatcctacgatactaactacgactggtacttcgatgtctggggccaagggaccacggtcaccgtctcctca

SEQ ID NO: 287 - protein, 499 aa, artificial sequence
  VL1/VH5x4-7 LHLH
DIQMTQSPSSLSASVGDRVTITCRASQSVSYMNWYQQKPGKAPKRWIYDTSKVASGVPARFSGSGSGTDYSLTINSLEAEDAATYYCQQWSSNPLTFGGGTKVEIKGEGTSTGSGGSGGSGGADDVQLVQSGAEVKKPGASVKVSCKASGYTFTRYTMHWVRQAPGQGLEWIGYINPSRGYTNYADSVKGRFTITTDKSTSTAYMELSSLRSEDTATYYCARYYDDHYCLDYWGQGTTVTVSSGGGGSELVMTQTPLSLPVSLGDQASISCRSSQSLVHSNGNTYLHWYLQKPGQSPKLLIYKVSNRFSGVPDRFSGSGSGTDFTLKISRVEAEDLGVYFCSQSTHVPYTFGGGTKLEIKGGGGSGGGGSGGGGSEVQLLEQSGAELARPGASVKLSCKASGYTFTNYGLSWVKQRPGQVLEWIGEVYPRIGNAYYNEKFKGKATLTADKSSSTASMELRSLTSEDSAVYFCARRGSYDTNYDWYFDVWGQGTTVTVSS

SEQ ID NO: 288 - DNA, 1500 bp, artificial sequence
  VH5/VL1x4-7 HLLH
gacgtccaactggtgcagtcaggggctgaagtgaaaaaacctggggcctcagtgaaggtgtcctgcaaggcttctggctacacctttactaggtacacgatgcactgggtaaggcaggcacctggacagggtctggaatggattggatacattaatcctagccgtggttatactaattacgcagacagcgtcaagggccgcttcacaatcactacagacaaatccaccagcacagcctacatggaactgagcagcctgcgttctgaggacactgcaacctattactgtgcaagatattatgatgatcattactgccttgactactggggccaaggcaccacggtcaccgtctcctcaggcgaaggtactagtactggttctggtggaagtggaggttcaggtggagcagacgacattcagatgacccagtctccatctagcctgtctgcatctgtcggggaccgtgtcaccatcacctgcagagccagtcaaagtgtaagttacatgaactggtaccagcagaagccgggcaaggcacccaaaagatggatttatgacacatccaaagtggcttctggagtccctgctcgcttcagtggcagtgggtctgggaccgactactctctcacaatcaacagcttggaggctgaagatgctgccacttattactgccaacagtggagtagtaacccgctcacgttcggtggcgggaccaaggtggagatcaaatccggaggtggtggatccgagctcgtgatgacccagactccactctccctgcctgtcagtcttggagatcaagcctccatctcttgcagatctagtcagagccttgtacacagtaatggaaacacctatttacattggtacctgcagaagccaggccagtctccaaagctcctgatctacaaagtttccaaccgattttctggggtcccagacaggttcagtggcagtggatcagggacagatttcacactcaagatcagcagagtggaggctgaggatctgggagtttatttctgctctcaaagtacacatgttccgtacacgttcggaggggggaccaagcttgagatcaaaggtggtggtggttctggcggcggcggctccggtggtggtggttctgaggtgcagctgctcgagcagtctggagctgagctggcgaggcctggggcttcagtgaagctgtcctgcaaggcttctggctacaccttcacaaactatggtttaagctgggtgaagcagaggcctggacaggtccttgagtggattggagaggtttatcctagaattggtaatgcttactacaatgagaagttcaagggcaaggccacactgactgcagacaaatcctccagcacagcgtccatggagctccgcagcctgacctctgaggactctgcggtctatttctgtgcaagacggggatcctacgatactaactacgactggtacttcgatgtctggggccaagggaccacggtcaccgtctcctca

SEQ ID NO: 289 - protein, 500 aa, artificial sequence
  VH5/VL1x4-7 HLLH
DVQLVQSGAEVKKPGASVKVSCKASGYTFTRYTMHWVRQAPGQGLEWIGYINPSRGYTNYADSVKGRFTITTDKSTSTAYMELSSLRSEDTATYYCARYYDDHYCLDYWGQGTTVTVSSGEGTSTGSGGSGGSGGADDIQMTQSPSSLSASVGDRVTITCRASQSVSYMNWYQQKPGKAPKRWIYDTSKVASGVPARFSGSGSGTDYSLTINSLEAEDAATYYCQQWSSNPLTFGGGTKVEIKSGGGGSELVMTQTPLSLPVSLGDQASISCRSSQSLVHSNGNTYLHWYLQKPGQSPKLLIYKVSNRFSGVPDRFSGSGSGTDFTLKISRVEAEDLGVYFCSQSTHVPYTFGGGTKLEIKGGGGSGGGGSGGGGSEVQLLEQSGAELARPGASVKLSCKASGYTFTNYGLSWVKQRPGQVLEWIGEVYPRIGNAYYNEKFKGKATLTADKSSSTASMELRSLTSEDSAVYFCARRGSYDTNYDWYFDVWGQGTTVTVSS

SEQ ID NO: 290 - DNA, 1497 bp, artificial sequence
  VL2/VH5x4-7 LHHL
gacattgtactgacccagtctccagcaactctgtctctgtctccaggggagcgtgccaccctgagctgcagagccagtcaaagtgtaagttacatgaactggtaccagcagaagccgggcaaggcacccaaaagatggatttatgacacatccaaagtggcttctggagtccctgctcgcttcagtggcagtgggtctgggaccgactactctctcacaatcaacagcttggaggctgaagatgctgccacttattactgccaacagtggagtagtaacccgctcacgttcggtggcgggaccaaggtggagatcaaaggcgaaggtactagtactggttctggtggaagtggaggttcaggtggagcagacgacgtccaactggtgcagtcaggggctgaagtgaaaaaacctggggcctcagtgaaggtgtcctgcaaggcttctggctacacctttactaggtacacgatgcactgggtaaggcaggcacctggacagggtctggaatggattggatacattaatcctagccgtggttatactaattacgcagacagcgtcaagggccgcttcacaatcactacagacaaatccaccagcacagcctacatggaactgagcagcctgcgttctgaggacactgcaacctattactgtgcaagatattatgatgatcattactgccttgactactggggccaaggcaccacggtcaccgtctcctccggaggtggtggatccgaggtgcagctgctcgagcagtctggagctgagctggcgaggcctggggcttcagtgaagctgtcctgcaaggcttctggctacaccttcacaaactatggtttaagctgggtgaagcagaggcctggacaggtccttgagtggattggagaggtttatcctagaattggtaatgcttactacaatgagaagttcaagggcaaggccacactgactgcagacaaatcctccagcacagcgtccatggagctccgcagcctgacctctgaggactctgcggtctatttctgtgcaagacggggatcctacgatactaactacgactggtacttcgatgtctggggccaagggaccacggtcaccgtctcctcaggtggtggtggttctggcggcggcggctccggtggtggtggttctgagctcgtgatgacccagactccactctccctgcctgtcagtcttggagatcaagcctccatctcttgcagatctagtcagagccttgtacacagtaatggaaacacctatttacattggtacctgcagaagccaggccagtctccaaagctcctgatctacaaagtttccaaccgattttctggggtcccagacaggttcagtggcagtggatcagggacagatttcacactcaagatcagcagagtggaggctgaggatctgggagtttatttctgctctcaaagtacacatgttccgtacacgttcggaggggggaccaagcttgagatcaaa

SEQ ID NO: 291 - protein, 499 aa, artificial sequence
  VL2/VH5x4-7 LHHL
DIVLTQSPATLSLSPGERATLSCRASQSVSYMNWYQQKPGKAPKRWIYDTSKVASGVPARFSGSGSGTDYSLTINSLEAEDAATYYCQQWSSNPLTFGGGTKVEIKGEGTSTGSGGSGGSGGADDVQLVQSGAEVKKPGASVKVSCKASGYTFTRYTMHWVRQAPGQGLEWIGYINPSRGYTNYADSVKGRFTITTDKSTSTAYMELSSLRSEDTATYYCARYYDDHYCLDYWGQGTTVTVSSGGGGSEVQLLEQSGAELARPGASVKLSCKASGYTFTNYGLSWVKQRPGQVLEWIGEVYPRIGNAYYNEKFKGKATLTADKSSSTASMELRSLTSEDSAVYFCARRGSYDTNYDWYFDVWGQGTTVTVSSGGGGSGGGGSGGGGSELVMTQTPLSLPVSLGDQASISCRSSQSLVHSNGNTYLHWYLQKPGQSPKLLIYKVSNRFSGVPDRFSGSGSGTDFTLKISRVEAEDLGVYFCSQSTHVPYTFGGGTKLEIK

SEQ ID NO: 292 - DNA, 1497 bp, artificial sequence
  VL2/VH5x4-7 LHLH
gacattgtactgacccagtctccagcaactctgtctctgtctccaggggagcgtgccaccctgagctgcagagccagtcaaagtgtaagttacatgaactggtaccagcagaagccgggcaaggcacccaaaagatggatttatgacacatccaaagtggcttctggagtccctgctcgcttcagtggcagtgggtctgggaccgactactctctcacaatcaacagcttggaggctgaagatgctgccacttattactgccaacagtggagtagtaacccgctcacgttcggtggcgggaccaaggtggagatcaaaggcgaaggtactagtactggttctggtggaagtggaggttcaggtggagcagacgacgtccaactggtgcagtcaggggctgaagtgaaaaaacctggggcctcagtgaaggtgtcctgcaaggcttctggctacacctttactaggtacacgatgcactgggtaaggcaggcacctggacagggtctggaatggattggatacattaatcctagccgtggttatactaattacgcagacagcgtcaagggccgcttcacaatcactacagacaaatccaccagcacagcctacatggaactgagcagcctgcgttctgaggacactgcaacctattactgtgcaagatattatgatgatcattactgccttgactactggggccaaggcaccacggtcaccgtctcctccggaggtggtggatccgagctcgtgatgacccagactccactctccctgcctgtcagtcttggagatcaagcctccatctcttgcagatctagtcagagccttgtacacagtaatggaaacacctatttacattggtacctgcagaagccaggccagtctccaaagctcctgatctacaaagtttccaaccgattttctggggtcccagacaggttcagtggcagtggatcagggacagatttcacactcaagatcagcagagtggaggctgaggatctgggagtttatttctgctctcaaagtacacatgttccgtacacgttcggaggggggaccaagcttgagatcaaaggtggtggtggttctggcggcggcggctccggtggtggtggttctgaggtgcagctgctcgagcagtctggagctgagctggcgaggcctggggcttcagtgaagctgtcctgcaaggcttctggctacaccttcacaaactatggtttaagctgggtgaagcagaggcctggacaggtccttgagtggattggagaggtttatcctagaattggtaatgcttactacaatgagaagttcaagggcaaggccacactgactgcagacaaatcctccagcacagcgtccatggagctccgcagcctgacctctgaggactctgcggtctatttctgtgcaagacggggatcctacgatactaactacgactggtacttcgatgtctggggccaagggaccacggtcaccgtctcctca

SEQ ID NO: 293 - protein, 499 aa, artificial sequence
  VL2/VH5x4-7 LHLH
DIVLTQSPATLSLSPGERATLSCRASQSVSYMNWYQQKPGKAPKRWIYDTSKVASGVPARFSGSGSGTDYSLTINSLEAEDAATYYCQQWSSNPLTFGGGTKVEIKGEGTSTGSGGSGGSGGADDVQLVQSGAEVKKPGASVKVSCKASGYTFTRYTMHWVRQAPGQGLEWIGYINPSRGYTNYADSVKGRFTITTDKSTSTAYMELSSLRSEDTATYYCARYYDDHYCLDYWGQGTTVTVSSGGGGSELVMTQTPLSLPVSLGDQASISCRSSQSLVHSNGNTYLHWYLQKPGQSPKLLIYKVSNRFSGVPDRFSGSGSGTDFTLKISRVEAEDLGVYFCSQSTHVPYTFGGGTKLEIKGGGGSGGGGSGGGGSEVQLLEQSGAELARPGASVKLSCKASGYTFTNYGLSWVKQRPGQVLEWIGEVYPRIGNAYYNEKFKGKATLTADKSSSTASMELRSLTSEDSAVYFCARRGSYDTNYDWYFDVWGQGTTVTVSS

SEQ ID NO: 294 - DNA, 1497 bp, artificial sequence
  VL3VH5x4-7 LHHL
gacattgtactgacccagtctccagcaactctgtctctgtctccaggggagcgtgccaccctgacctgcagagccagttcaagtgtaagttacatgaactggtaccagcagaagccgggcaaggcacccaaaagatggatttatgacacatccaaagtggcttctggagtccctgctcgcttcagtggcagtgggtctgggaccgactactctctcacaatcaacagcttggaggctgaagatgctgccacttattactgccaacagtggagtagtaacccgctcacgttcggtggcgggaccaaggtggagatcaaaggcgaaggtactagtactggttctggtggaagtggaggttcaggtggagcagacgacgtccaactggtgcagtcaggggctgaagtgaaaaaacctggggcctcagtgaaggtgtcctgcaaggcttctggctacacctttactaggtacacgatgcactgggtaaggcaggcacctggacagggtctggaatggattggatacattaatcctagccgtggttatactaattacgcagacagcgtcaagggccgcttcacaatcactacagacaaatccaccagcacagcctacatggaactgagcagcctgcgttctgaggacactgcaacctattactgtgcaagatattatgatgatcattactgccttgactactggggccaaggcaccacggtcaccgtctcctccggaggtggtggatccgaggtgcagctgctcgagcagtctggagctgagctggcgaggcctggggcttcagtgaagctgtcctgcaaggcttctggctacaccttcacaaactatggtttaagctgggtgaagcagaggcctggacaggtccttgagtggattggagaggtttatcctagaattggtaatgcttactacaatgagaagttcaagggcaaggccacactgactgcagacaaatcctccagcacagcgtccatggagctccgcagcctgacctctgaggactctgcggtctatttctgtgcaagacggggatcctacgatactaactacgactggtacttcgatgtctggggccaagggaccacggtcaccgtctcctcaggtggtggtggttctggcggcggcggctccggtggtggtggttctgagctcgtgatgacccagactccactctccctgcctgtcagtcttggagatcaagcctccatctcttgcagatctagtcagagccttgtacacagtaatggaaacacctatttacattggtacctgcagaagccaggccagtctccaaagctcctgatctacaaagtttccaaccgattttctggggtcccagacaggttcagtggcagtggatcagggacagatttcacactcaagatcagcagagtggaggctgaggatctgggagtttatttctgctctcaaagtacacatgttccgtacacgttcggaggggggaccaagcttgagatcaaa

SEQ ID NO: 295 - protein, 499 aa, artificial sequence
  VL3/VH5x4-7 LHHL
DIVLTQSPATLSLSPGERATLTCRASSSVSYMNWYQQKPGKAPKRWIYDTSKVASGVPARFSGSGSGTDYSLTINSLEAEDAATYYCQQWSSNPLTFGGGTKVEIKGEGTSTGSGGSGGSGGADDVQLVQSGAEVKKPGASVKVSCKASGYTFTRYTMHWVRQAPGQGLEWIGYINPSRGYTNYADSVKGRFTITTDKSTSTAYMELSSLRSEDTATYYCARYYDDHYCLDYWGQGTTVTVSSGGGGSEVQLLEQSGAELARPGASVKLSCKASGYTFTNYGLSWVKQRPGQVLEWIGEVYPRIGNAYYNEKFKGKATLTADKSSSTASMELRSLTSEDSAVYFCARRGSYDTNYDWYFDVWGQGTTVTVSSGGGGSGGGGSGGGGSELVMTQTPLSLPVSLGDQASISCRSSQSLVHSNGNTYLHWYLQKPGQSPKLLIYKVSNRFSGVPDRFSGSGSGTDFTLKISRVEAEDLGVYFCSQSTHVPYTFGGGTKLEIK

SEQ ID NO: 296 - DNA, 1503 bp, artificial sequence
  VH5VL3x4-7 HLHL
gacgtccaactggtgcagtcaggggctgaagtgaaaaaacctggggcctcagtgaaggtgtcctgcaaggcttctggctacacctttactaggtacacgatgcactgggtaaggcaggcacctggacagggtctggaatggattggatacattaatcctagccgtggttatactaattacgcagacagcgtcaagggccgcttcacaatcactacagacaaatccaccagcacagcctacatggaactgagcagcctgcgttctgaggacactgcaacctattactgtgcaagatattatgatgatcattactgccttgactactggggccaaggcaccacggtcaccgtctcctcaggcgaaggtactagtactggttctggtggaagtggaggttcaggtggagcagacgacattgtactgacccagtctccagcaactctgtctctgtctccaggggagcgtgccaccctgacctgcagagccagttcaagtgtaagttacatgaactggtaccagcagaagccgggcaaggcacccaaaagatggatttatgacacatccaaagtggcttctggagtccctgctcgcttcagtggcagtgggtctgggaccgactactctctcacaatcaacagcttggaggctgaagatgctgccacttattactgccaacagtggagtagtaacccgctcacgttcggtggcgggaccaaggtggagatcaaatccggaggtggtggatccgaggtgcagctgctcgagcagtctggagctgagctggcgaggcctggggcttcagtgaagctgtcctgcaaggcttctggctacaccttcacaaactatggtttaagctgggtgaagcagaggcctggacaggtccttgagtggattggagaggtttatcctagaattggtaatgcttactacaatgagaagttcaagggcaaggccacactgactgcagacaaatcctccagcacagcgtccatggagctccgcagcctgacctctgaggactctgcggtctatttctgtgcaagacggggatcctacgatactaactacgactggtacttcgatgtctggggccaagggaccacggtcaccgtctcctcaggtggtggtggttctggcggcggcggctccggtggtggtggttctgagctcgtgatgacccagactccactctccctgcctgtcagtcttggagatcaagcctccatctcttgcagatctagtcagagccttgtacacagtaatggaaacacctatttacattggtacctgcagaagccaggccagtctccaaagctcctgatctacaaagtttccaaccgattttctggggtcccagacaggttcagtggcagtggatcagggacagatttcacactcaagatcagcagagtggaggctgaggatctgggagtttatttctgctctcaaagtacacatgttccgtacacgttcggaggggggaccaagcttgagatcaaacat

SEQ ID NO: 297 - protein, 500 aa, artificial sequence
  VH5VL3x4-7 HLHL
DVQLVQSGAEVKKPGASVKVSCKASGYTFTRYTMHWVRQAPGQGLEWIGYINPSRGYTNYADSVKGRFTITTDKSTSTAYMELSSLRSEDTATYYCARYYDDHYCLDYWGQGTTVTVSSGEGTSTGSGGSGGSGGADDIVLTQSPATLSLSPGERATLTCRASSSVSYMNWYQQKPGKAPKRWIYDTSKVASGVPARFSGSGSGTDYSLTINSLEAEDAATYYCQQWSSNPLTFGGGTKVEIKSGGGGSEVQLLEQSGAELARPGASVKLSCKASGYTFTNYGLSWVKQRPGQVLEWIGEVYPRIGNAYYNEKFKGKATLTADKSSSTASMELRSLTSEDSAVYFCARRGSYDTNYDWYFDVWGQGTTVTVSSGGGGSGGGGSGGGGSELVMTQTPLSLPVSLGDQASISCRSSQSLVHSNGNTYLHWYLQKPGQSPKLLIYKVSNRFSGVPDRFSGSGSGTDFTLKISRVEAEDLGVYFCSQSTHVPYTFGGGTKLEIK

SEQ ID NO: 298 - DNA, 1497 bp, artificial sequence
  VL3VH5x4-7 LHLH
gacattgtactgacccagtctccagcaactctgtctctgtctccaggggagcgtgccaccctgacctgcagagccagttcaagtgtaagttacatgaactggtaccagcagaagccgggcaaggcacccaaaagatggatttatgacacatccaaagtggcttctggagtccctgctcgcttcagtggcagtgggtctgggaccgactactctctcacaatcaacagcttggaggctgaagatgctgccacttattactgccaacagtggagtagtaacccgctcacgttcggtggcgggaccaaggtggagatcaaaggcgaaggtactagtactggttctggtggaagtggaggttcaggtggagcagacgacgtccaactggtgcagtcaggggctgaagtgaaaaaacctggggcctcagtgaaggtgtcctgcaaggcttctggctacacctttactaggtacacgatgcactgggtaaggcaggcacctggacagggtctggaatggattggatacattaatcctagccgtggttatactaattacgcagacagcgtcaagggccgcttcacaatcactacagacaaatccaccagcacagcctacatggaactgagcagcctgcgttctgaggacactgcaacctattactgtgcaagatattatgatgatcattactgccttgactactggggccaaggcaccacggtcaccgtctcctccggaggtggtggatccgagctcgtgatgacccagactccactctccctgcctgtcagtcttggagatcaagcctccatctcttgcagatctagtcagagccttgtacacagtaatggaaacacctatttacattggtacctgcagaagccaggccagtctccaaagctcctgatctacaaagtttccaaccgattttctggggtcccagacaggttcagtggcagtggatcagggacagatttcacactcaagatcagcagagtggaggctgaggatctgggagtttatttctgctctcaaagtacacatgttccgtacacgttcggaggggggaccaagcttgagatcaaaggtggtggtggttctggcggcggcggctccggtggtggtggttctgaggtgcagctgctcgagcagtctggagctgagctggcgaggcctggggcttcagtgaagctgtcctgcaaggcttctggctacaccttcacaaactatggtttaagctgggtgaagcagaggcctggacaggtccttgagtggattggagaggtttatcctagaattggtaatgcttactacaatgagaagttcaagggcaaggccacactgactgcagacaaatcctccagcacagcgtccatggagctccgcagcctgacctctgaggactctgcggtctatttctgtgcaagacggggatcctacgatactaactacgactggtacttcgatgtctggggccaagggaccacggtcaccgtctcctca

SEQ ID NO: 299 - protein, 499 aa, artificial sequence
  VL3/VH5x4-7 LHLH
DIVLTQSPATLSLSPGERATLTCRASSSVSYMNWYQQKPGKAPKRWIYDTSKVASGVPARFSGSGSGTDYSLTINSLEAEDAATYYCQQWSSNPLTFGGGTKVEIKGEGTSTGSGGSGGSGGADDVQLVQSGAEVKKPGASVKVSCKASGYTFTRYTMHWVRQAPGQGLEWIGYINPSRGYTNYADSVKGRFTITTDKSTSTAYMELSSLRSEDTATYYCARYYDDHYCLDYWGQGTTVTVSSGGGGSELVMTQTPLSLPVSLGDQASISCRSSQSLVHSNGNTYLHWYLQKPGQSPKLLIYKVSNRFSGVPDRFSGSGSGTDFTLKISRVEAEDLGVYFCSQSTHVPYTFGGGTKLEIKGGGGSGGGGSGGGGSEVQLLEQSGAELARPGASVKLSCKASGYTFTNYGLSWVKQRPGQVLEWIGEVYPRIGNAYYNEKFKGKATLTADKSSSTASMELRSLTSEDSAVYFCARRGSYDTNYDWYFDVWGQGTTVTVSS

SEQ ID NO: 300 - DNA, 1500 bp, artificial sequence
  VH5VL3x4-7 HLLH
gacgtccaactggtgcagtcaggggctgaagtgaaaaaacctggggcctcagtgaaggtgtcctgcaaggcttctggctacacctttactaggtacacgatgcactgggtaaggcaggcacctggacagggtctggaatggattggatacattaatcctagccgtggttatactaattacgcagacagcgtcaagggccgcttcacaatcactacagacaaatccaccagcacagcctacatggaactgagcagcctgcgttctgaggacactgcaacctattactgtgcaagatattatgatgatcattactgccttgactactggggccaaggcaccacggtcaccgtctcctcaggcgaaggtactagtactggttctggtggaagtggaggttcaggtggagcagacgacattgtactgacccagtctccagcaactctgtctctgtctccaggggagcgtgccaccctgacctgcagagccagttcaagtgtaagttacatgaactggtaccagcagaagccgggcaaggcacccaaaagatggatttatgacacatccaaagtggcttctggagtccctgctcgcttcagtggcagtgggtctgggaccgactactctctcacaatcaacagcttggaggctgaagatgctgccacttattactgccaacagtggagtagtaacccgctcacgttcggtggcgggaccaaggtggagatcaaatccggaggtggtggatccgagctcgtgatgacccagactccactctccctgcctgtcagtcttggagatcaagcctccatctcttgcagatctagtcagagccttgtacacagtaatggaaacacctatttacattggtacctgcagaagccaggccagtctccaaagctcctgatctacaaagtttccaaccgattttctggggtcccagacaggttcagtggcagtggatcagggacagatttcacactcaagatcagcagagtggaggctgaggatctgggagtttatttctgctctcaaagtacacatgttccgtacacgttcggaggggggaccaagcttgagatcaaaggtggtggtggttctggcggcggcggctccggtggtggtggttctgaggtgcagctgctcgagcagtctggagctgagctggcgaggcctggggcttcagtgaagctgtcctgcaaggcttctggctacaccttcacaaactatggtttaagctgggtgaagcagaggcctggacaggtccttgagtggattggagaggtttatcctagaattggtaatgcttactacaatgagaagttcaagggcaaggccacactgactgcagacaaatcctccagcacagcgtccatggagctccgcagcctgacctctgaggactctgcggtctatttctgtgcaagacggggatcctacgatactaactacgactggtacttcgatgtctggggccaagggaccacggtcaccgtctcctca

SEQ ID NO: 301 - protein, 500 aa, artificial sequence
  VH5VL3x4-7 HLLH
DVQLVQSGAEVKKPGASVKVSCKASGYTFTRYTMHWVRQAPGQGLEWIGYINPSRGYTNYADSVKGRFTITTDKSTSTAYMELSSLRSEDTATYYCARYYDDHYCLDYWGQGTTVTVSSGEGTSTGSGGSGGSGGADDIVLTQSPATLSLSPGERATLTCRASSSVSYMNWYQQKPGKAPKRWIYDTSKVASGVPARFSGSGSGTDYSLTINSLEAEDAATYYCQQWSSNPLTFGGGTKVEIKSGGGGSELVMTQTPLSLPVSLGDQASISCRSSQSLVHSNGNTYLHWYLQKPGQSPKLLIYKVSNRFSGVPDRFSGSGSGTDFTLKISRVEAEDLGVYFCSQSTHVPYTFGGGTKLEIKGGGGSGGGGSGGGGSEVQLLEQSGAELARPGASVKLSCKASGYTFTNYGLSWVKQRPGQVLEWIGEVYPRIGNAYYNEKFKGKATLTADKSSSTASMELRSLTSEDSAVYFCARRGSYDTNYDWYFDVWGQGTTVTVSS

SEQ ID NO: 302 - DNA, 1497 bp, artificial sequence
  VL1VH7x4-7 LHHL
gacattcagatgacccagtctccatctagcctgtctgcatctgtcggggaccgtgtcaccatcacctgcagagccagtcaaagtgtaagttacatgaactggtaccagcagaagccgggcaaggcacccaaaagatggatttatgacacatccaaagtggcttctggagtccctgctcgcttcagtggcagtgggtctgggaccgactactctctcacaatcaacagcttggaggctgaagatgctgccacttattactgccaacagtggagtagtaacccgctcacgttcggtggcgggaccaaggtggagatcaaaggcgaaggtactagtactggttctggtggaagtggaggttcaggtggagcagacgacgtccaactggtgcagtcaggggctgaagtgaaaaaacctggggcctcagtgaaggtgtcctgcaaggcttctggctacacctttactaggtacacgatgcactgggtaaggcaggcacctggacagggtctggaatggattggatacattaatcctagccgtggttatactaattacaatcagaagttcaaggaccgcgtcacaatcactacagacaaatccaccagcacagcctacatggaactgagcagcctgcgttctgaggacactgcagtctattactgtgcaagatattatgatgatcattactgccttgactactggggccaaggcaccacggtcaccgtctcctccggaggtggtggatccgaggtgcagctgctcgagcagtctggagctgagctggcgaggcctggggcttcagtgaagctgtcctgcaaggcttctggctacaccttcacaaactatggtttaagctgggtgaagcagaggcctggacaggtccttgagtggattggagaggtttatcctagaattggtaatgcttactacaatgagaagttcaagggcaaggccacactgactgcagacaaatcctccagcacagcgtccatggagctccgcagcctgacctctgaggactctgcggtctatttctgtgcaagacggggatcctacgatactaactacgactggtacttcgatgtctggggccaagggaccacggtcaccgtctcctcaggtggtggtggttctggcggcggcggctccggtggtggtggttctgagctcgtgatgacccagactccactctccctgcctgtcagtcttggagatcaagcctccatctcttgcagatctagtcagagccttgtacacagtaatggaaacacctatttacattggtacctgcagaagccaggccagtctccaaagctcctgatctacaaagtttccaaccgattttctggggtcccagacaggttcagtggcagtggatcagggacagatttcacactcaagatcagcagagtggaggctgaggatctgggagtttatttctgctctcaaagtacacatgttccgtacacgttcggaggggggaccaagcttgagatcaaa

SEQ ID NO: 303 - protein, 499 aa, artificial sequence
  VL1VH7x4-7 LHHL
DIQMTQSPSSLSASVGDRVTITCRASQSVSYMNWYQQKPGKAPKRWIYDTSKVASGVPARFSGSGSGTDYSLTINSLEAEDAATYYCQQWSSNPLTFGGGTKVEIKGEGTSTGSGGSGGSGGADDVQLVQSGAEVKKPGASVKVSCKASGYTFTRYTMHWVRQAPGQGLEWIGYINPSRGYTNYNQKFKDRVTITTDKSTSTAYMELSSLRSEDTAVYYCARYYDDHYCLDYWGQGTTVTVSSGGGGSEVQLLEQSGAELARPGASVKLSCKASGYTFTNYGLSWVKQRPGQVLEWIGEVYPRIGNAYYNEKFKGKATLTADKSSSTASMELRSLTSEDSAVYFCARRGSYDTNYDWYFDVWGQGTTVTVSSGGGGSGGGGSGGGGSELVMTQTPLSLPVSLGDQASISCRSSQSLVHSNGNTYLHWYLQKPGQSPKLLIYKVSNRFSGVPDRFSGSGSGTDFTLKISRVEAEDLGVYFCSQSTHVPYTFGGGTKLEIK

SEQ ID NO: 304 - DNA, 1500 bp, artificial sequence
  VH7-VL1x4-7 HLHL
gacgtccaactggtgcagtcaggggctgaagtgaaaaaacctggggcctcagtgaaggtgtcctgcaaggcttctggctacacctttactaggtacacgatgcactgggtaaggcaggcacctggacagggtctggaatggattggatacattaatcctagccgtggttatactaattacaatcagaagttcaaggaccgcgtcacaatcactacagacaaatccaccagcacagcctacatggaactgagcagcctgcgttctgaggacactgcagtctattactgtgcaagatattatgatgatcattactgccttgactactggggccaaggcaccacggtcaccgtctcctcaggcgaaggtactagtactggttctggtggaagtggaggttcaggtggagcagacgacattcagatgacccagtctccatctagcctgtctgcatctgtcggggaccgtgtcaccatcacctgcagagccagtcaaagtgtaagttacatgaactggtaccagcagaagccgggcaaggcacccaaaagatggatttatgacacatccaaagtggcttctggagtccctgctcgcttcagtggcagtgggtctgggaccgactactctctcacaatcaacagcttggaggctgaagatgctgccacttattactgccaacagtggagtagtaacccgctcacgttcggtggcgggaccaaggtggagatcaaatccggaggtggtggatccgaggtgcagctgctcgagcagtctggagctgagctggcgaggcctggggcttcagtgaagctgtcctgcaaggcttctggctacaccttcacaaactatggtttaagctgggtgaagcagaggcctggacaggtccttgagtggattggagaggtttatcctagaattggtaatgcttactacaatgagaagttcaagggcaaggccacactgactgcagacaaatcctccagcacagcgtccatggagctccgcagcctgacctctgaggactctgcggtctatttctgtgcaagacggggatcctacgatactaactacgactggtacttcgatgtctggggccaagggaccacggtcaccgtctcctcaggtggtggtggttctggcggcggcggctccggtggtggtggttctgagctcgtgatgacccagactccactctccctgcctgtcagtcttggagatcaagcctccatctcttgcagatctagtcagagccttgtacacagtaatggaaacacctatttacattggtacctgcagaagccaggccagtctccaaagctcctgatctacaaagtttccaaccgattttctggggtcccagacaggttcagtggcagtggatcagggacagatttcacactcaagatcagcagagtggaggctgaggatctgggagtttatttctgctctcaaagtacacatgttccgtacacgttcggaggggggaccaagcttgagatcaaa

SEQ ID NO: 305 - protein, 500 aa, artificial sequence
  VH7-VL1x4-7 HLHL
DVQLVQSGAEVKKPGASVKVSCKASGYTFTRYTMHWVRQAPGQGLEWIGYINPSRGYTNYNQKFKDRVTITTDKSTSTAYMELSSLRSEDTAVYYCARYYDDHYCLDYWGQGTTVTVSSGEGTSTGSGGSGGSGGADDIQMTQSPSSLSASVGDRVTITCRASQSVSYMNWYQQKPGKAPKRWIYDTSKVASGVPARFSGSGSGTDYSLTINSLEAEDAATYYCQQWSSNPLTFGGGTKVEIKSGGGGSEVQLLEQSGAELARPGASVKLSCKASGYTFTNYGLSWVKQRPGQVLEWIGEVYPRIGNAYYNEKFKGKATLTADKSSSTASMELRSLTSEDSAVYFCARRGSYDTNYDWYFDVWGQGTTVTVSSGGGGSGGGGSGGGGSELVMTQTPLSLPVSLGDQASISCRSSQSLVHSNGNTYLHWYLQKPGQSPKLLIYKVSNRFSGVPDRFSGSGSGTDFTLKISRVEAEDLGVYFCSQSTHVPYTFGGGTKLEIK

SEQ ID NO: 306 - DNA, 1497 bp, artificial sequence
  VL1-VH7x4-7 LHLH
gacattcagatgacccagtctccatctagcctgtctgcatctgtcggggaccgtgtcaccatcacctgcagagccagtcaaagtgtaagttacatgaactggtaccagcagaagccgggcaaggcacccaaaagatggatttatgacacatccaaagtggcttctggagtccctgctcgcttcagtggcagtgggtctgggaccgactactctctcacaatcaacagcttggaggctgaagatgctgccacttattactgccaacagtggagtagtaacccgctcacgttcggtggcgggaccaaggtggagatcaaaggcgaaggtactagtactggttctggtggaagtggaggttcaggtggagcagacgacgtccaactggtgcagtcaggggctgaagtgaaaaaacctggggcctcagtgaaggtgtcctgcaaggcttctggctacacctttactaggtacacgatgcactgggtaaggcaggcacctggacagggtctggaatggattggatacattaatcctagccgtggttatactaattacaatcagaagttcaaggaccgcgtcacaatcactacagacaaatccaccagcacagcctacatggaactgagcagcctgcgttctgaggacactgcagtctattactgtgcaagatattatgatgatcattactgccttgactactggggccaaggcaccacggtcaccgtctcctccggaggtggtggatccgagctcgtgatgacccagactccactctccctgcctgtcagtcttggagatcaagcctccatctcttgcagatctagtcagagccttgtacacagtaatggaaacacctatttacattggtacctgcagaagccaggccagtctccaaagctcctgatctacaaagtttccaaccgattttctggggtcccagacaggttcagtggcagtggatcagggacagatttcacactcaagatcagcagagtggaggctgaggatctgggagtttatttctgctctcaaagtacacatgttccgtacacgttcggaggggggaccaagcttgagatcaaaggtggtggtggttctggcggcggcggctccggtggtggtggttctgaggtgcagctgctcgagcagtctggagctgagctggcgaggcctggggcttcagtgaagctgtcctgcaaggcttctggctacaccttcacaaactatggtttaagctgggtgaagcagaggcctggacaggtccttgagtggattggagaggtttatcctagaattggtaatgcttactacaatgagaagttcaagggcaaggccacactgactgcagacaaatcctccagcacagcgtccatggagctccgcagcctgacctctgaggactctgcggtctatttctgtgcaagacggggatcctacgatactaactacgactggtacttcgatgtctggggccaagggaccacggtcaccgtctcctca

SEQ ID NO: 307 - protein, 499 aa, artificial sequence
  VL1-VH7x4-7 LHLH
DIQMTQSPSSLSASVGDRVTITCRASQSVSYMNWYQQKPGKAPKRWIYDTSKVASGVPARFSGSGSGTDYSLTINSLEAEDAATYYCQQWSSNPLTFGGGTKVEIKGEGTSTGSGGSGGSGGADDVQLVQSGAEVKKPGASVKVSCKASGYTFTRYTMHWVRQAPGQGLEWIGYINPSRGYTNYNQKFKDRVTITTDKSTSTAYMELSSLRSEDTAVYYCARYYDDHYCLDYWGQGTTVTVSSGGGGSELVMTQTPLSLPVSLGDQASISCRSSQSLVHSNGNTYLHWYLQKPGQSPKLLIYKVSNRFSGVPDRFSGSGSGTDFTLKISRVEAEDLGVYFCSQSTHVPYTFGGGTKLEIKGGGGSGGGGSGGGGSEVQLLEQSGAELARPGASVKLSCKASGYTFTNYGLSWVKQRPGQVLEWIGEVYPRIGNAYYNEKFKGKATLTADKSSSTASMELRSLTSEDSAVYFCARRGSYDTNYDWYFDVWGQGTTVTVSS

SEQ ID NO: 308 - DNA, 1500 bp, artificial sequence
  VH7-VL1x4-7 HLLH
gacgtccaactggtgcagtcaggggctgaagtgaaaaaacctggggcctcagtgaaggtgtcctgcaaggcttctggctacacctttactaggtacacgatgcactgggtaaggcaggcacctggacagggtctggaatggattggatacattaatcctagccgtggttatactaattacaatcagaagttcaaggaccgcgtcacaatcactacagacaaatccaccagcacagcctacatggaactgagcagcctgcgttctgaggacactgcagtctattactgtgcaagatattatgatgatcattactgccttgactactggggccaaggcaccacggtcaccgtctcctcaggcgaaggtactagtactggttctggtggaagtggaggttcaggtggagcagacgacattcagatgacccagtctccatctagcctgtctgcatctgtcggggaccgtgtcaccatcacctgcagagccagtcaaagtgtaagttacatgaactggtaccagcagaagccgggcaaggcacccaaaagatggatttatgacacatccaaagtggcttctggagtccctgctcgcttcagtggcagtgggtctgggaccgactactctctcacaatcaacagcttggaggctgaagatgctgccacttattactgccaacagtggagtagtaacccgctcacgttcggtggcgggaccaaggtggagatcaaatccggaggtggtggatccgagctcgtgatgacccagactccactctccctgcctgtcagtcttggagatcaagcctccatctcttgcagatctagtcagagccttgtacacagtaatggaaacacctatttacattggtacctgcagaagccaggccagtctccaaagctcctgatctacaaagtttccaaccgattttctggggtcccagacaggttcagtggcagtggatcagggacagatttcacactcaagatcagcagagtggaggctgaggatctgggagtttatttctgctctcaaagtacacatgttccgtacacgttcggaggggggaccaagcttgagatcaaaggtggtggtggttctggcggcggcggctccggtggtggtggttctgaggtgcagctgctcgagcagtctggagctgagctggcgaggcctggggcttcagtgaagctgtcctgcaaggcttctggctacaccttcacaaactatggtttaagctgggtgaagcagaggcctggacaggtccttgagtggattggagaggtttatcctagaattggtaatgcttactacaatgagaagttcaagggcaaggccacactgactgcagacaaatcctccagcacagcgtccatggagctccgcagcctgacctctgaggactctgcggtctatttctgtgcaagacggggatcctacgatactaactacgactggtacttcgatgtctggggccaagggaccacggtcaccgtctcctca

SEQ ID NO: 309 - protein, 500 aa, artificial sequence
  VH7-VL1x4-7 HLLH
DVQLVQSGAEVKKPGASVKVSCKASGYTFTRYTMHWVRQAPGQGLEWIGYINPSRGYTNYNQKFKDRVTITTDKSTSTAYMELSSLRSEDTAVYYCARYYDDHYCLDYWGQGTTVTVSSGEGTSTGSGGSGGSGGADDIQMTQSPSSLSASVGDRVTITCRASQSVSYMNWYQQKPGKAPKRWIYDTSKVASGVPARFSGSGSGTDYSLTINSLEAEDAATYYCQQWSSNPLTFGGGTKVEIKSGGGGSELVMTQTPLSLPVSLGDQASISCRSSQSLVHSNGNTYLHWYLQKPGQSPKLLIYKVSNRFSGVPDRFSGSGSGTDFTLKISRVEAEDLGVYFCSQSTHVPYTFGGGTKLEIKGGGGSGGGGSGGGGSEVQLLEQSGAELARPGASVKLSCKASGYTFTNYGLSWVKQRPGQVLEWIGEVYPRIGNAYYNEKFKGKATLTADKSSSTASMELRSLTSEDSAVYFCARRGSYDTNYDWYFDVWGQGTTVTVSS

SEQ ID NO: 310 - DNA, 1497 bp, artificial sequence
  VL2VH7x4-7 LHHL
gacattgtactgacccagtctccagcaactctgtctctgtctccaggggagcgtgccaccctgagctgcagagccagtcaaagtgtaagttacatgaactggtaccagcagaagccgggcaaggcacccaaaagatggatttatgacacatccaaagtggcttctggagtccctgctcgcttcagtggcagtgggtctgggaccgactactctctcacaatcaacagcttggaggctgaagatgctgccacttattactgccaacagtggagtagtaacccgctcacgttcggtggcgggaccaaggtggagatcaaaggcgaaggtactagtactggttctggtggaagtggaggttcaggtggagcagacgacgtccaactggtgcagtcaggggctgaagtgaaaaaacctggggcctcagtgaaggtgtcctgcaaggcttctggctacacctttactaggtacacgatgcactgggtaaggcaggcacctggacagggtctggaatggattggatacattaatcctagccgtggttatactaattacaatcagaagttcaaggaccgcgtcacaatcactacagacaaatccaccagcacagcctacatggaactgagcagcctgcgttctgaggacactgcagtctattactgtgcaagatattatgatgatcattactgccttgactactggggccaaggcaccacggtcaccgtctcctccggaggtggtggatccgaggtgcagctgctcgagcagtctggagctgagctggcgaggcctggggcttcagtgaagctgtcctgcaaggcttctggctacaccttcacaaactatggtttaagctgggtgaagcagaggcctggacaggtccttgagtggattggagaggtttatcctagaattggtaatgcttactacaatgagaagttcaagggcaaggccacactgactgcagacaaatcctccagcacagcgtccatggagctccgcagcctgacctctgaggactctgcggtctatttctgtgcaagacggggatcctacgatactaactacgactggtacttcgatgtctggggccaagggaccacggtcaccgtctcctcaggtggtggtggttctggcggcggcggctccggtggtggtggttctgagctcgtgatgacccagactccactctccctgcctgtcagtcttggagatcaagcctccatctcttgcagatctagtcagagccttgtacacagtaatggaaacacctatttacattggtacctgcagaagccaggccagtctccaaagctcctgatctacaaagtttccaaccgattttctggggtcccagacaggttcagtggcagtggatcagggacagatttcacactcaagatcagcagagtggaggctgaggatctgggagtttatttctgctctcaaagtacacatgttccgtacacgttcggaggggggaccaagcttgagatcaaa

SEQ ID NO: 311 - protein, 499 aa, artificial sequence
  VL2VH7x4-7 LHHL
DIVLTQSPATLSLSPGERATLSCRASQSVSYMNWYQQKPGKAPKRWIYDTSKVASGVPARFSGSGSGTDYSLTINSLEAEDAATYYCQQWSSNPLTFGGGTKVEIKGEGTSTGSGGSGGSGGADDVQLVQSGAEVKKPGASVKVSCKASGYTFTRYTMHWVRQAPGQGLEWIGYINPSRGYTNYNQKFKDRVTITTDKSTSTAYMELSSLRSEDTAVYYCARYYDDHYCLDYWGQGTTVTVSSGGGGSEVQLLEQSGAELARPGASVKLSCKASGYTFTNYGLSWVKQRPGQVLEWIGEVYPRIGNAYYNEKFKGKATLTADKSSSTASMELRSLTSEDSAVYFCARRGSYDTNYDWYFDVWGQGTTVTVSSGGGGSGGGGSGGGGSELVMTQTPLSLPVSLGDQASISCRSSQSLVHSNGNTYLHWYLQKPGQSPKLLIYKVSNRFSGVPDRFSGSGSGTDFTLKISRVEAEDLGVYFCSQSTHVPYTFGGGTKLEIK

SEQ ID NO: 312 - DNA, 1500 bp, artificial sequence
  VH7VL2x4-7 HLHL
gacgtccaactggtgcagtcaggggctgaagtgaaaaaacctggggcctcagtgaaggtgtcctgcaaggcttctggctacacctttactaggtacacgatgcactgggtaaggcaggcacctggacagggtctggaatggattggatacattaatcctagccgtggttatactaattacaatcagaagttcaaggaccgcgtcacaatcactacagacaaatccaccagcacagcctacatggaactgagcagcctgcgttctgaggacactgcagtctattactgtgcaagatattatgatgatcattactgccttgactactggggccaaggcaccacggtcaccgtctcctcaggcgaaggtactagtactggttctggtggaagtggaggttcaggtggagcagacgacattgtactgacccagtctccagcaactctgtctctgtctccaggggagcgtgccaccctgagctgcagagccagtcaaagtgtaagttacatgaactggtaccagcagaagccgggcaaggcacccaaaagatggatttatgacacatccaaagtggcttctggagtccctgctcgcttcagtggcagtgggtctgggaccgactactctctcacaatcaacagcttggaggctgaagatgctgccacttattactgccaacagtggagtagtaacccgctcacgttcggtggcgggaccaaggtggagatcaaatccggaggtggtggatccgaggtgcagctgctcgagcagtctggagctgagctggcgaggcctggggcttcagtgaagctgtcctgcaaggcttctggctacaccttcacaaactatggtttaagctgggtgaagcagaggcctggacaggtccttgagtggattggagaggtttatcctagaattggtaatgcttactacaatgagaagttcaagggcaaggccacactgactgcagacaaatcctccagcacagcgtccatggagctccgcagcctgacctctgaggactctgcggtctatttctgtgcaagacggggatcctacgatactaactacgactggtacttcgatgtctggggccaagggaccacggtcaccgtctcctcaggtggtggtggttctggcggcggcggctccggtggtggtggttctgagctcgtgatgacccagactccactctccctgcctgtcagtcttggagatcaagcctccatctcttgcagatctagtcagagccttgtacacagtaatggaaacacctatttacattggtacctgcagaagccaggccagtctccaaagctcctgatctacaaagtttccaaccgattttctggggtcccagacaggttcagtggcagtggatcagggacagatttcacactcaagatcagcagagtggaggctgaggatctgggagtttatttctgctctcaaagtacacatgttccgtacacgttcggaggggggaccaagcttgagatcaaa

SEQ ID NO: 313 - protein, 500 aa, artificial sequence
  VH7VL2x4-7 HLHL
DVQLVQSGAEVKKPGASVKVSCKASGYTFTRYTMHWVRQAPGQGLEWIGYINPSRGYTNYNQKFKDRVTITTDKSTSTAYMELSSLRSEDTAVYYCARYYDDHYCLDYWGQGTTVTVSSGEGTSTGSGGSGGSGGADDIVLTQSPATLSLSPGERATLSCRASQSVSYMNWYQQKPGKAPKRWIYDTSKVASGVPARFSGSGSGTDYSLTINSLEAEDAATYYCQQWSSNPLTFGGGTKVEIKSGGGGSEVQLLEQSGAELARPGASVKLSCKASGYTFTNYGLSWVKQRPGQVLEWIGEVYPRIGNAYYNEKFKGKATLTADKSSSTASMELRSLTSEDSAVYFCARRGSYDTNYDWYFDVWGQGTTVTVSSGGGGSGGGGSGGGGSELVMTQTPLSLPVSLGDQASISCRSSQSLVHSNGNTYLHWYLQKPGQSPKLLIYKVSNRFSGVPDRFSGSGSGTDFTLKISRVEAEDLGVYFCSQSTHVPYTFGGGTKLEIK

SEQ ID NO: 314 - DNA, 1497 bp, artificial sequence
  VL2VH7x4-7 LHLH
gacattgtactgacccagtctccagcaactctgtctctgtctccaggggagcgtgccaccctgagctgcagagccagtcaaagtgtaagttacatgaactggtaccagcagaagccgggcaaggcacccaaaagatggatttatgacacatccaaagtggcttctggagtccctgctcgcttcagtggcagtgggtctgggaccgactactctctcacaatcaacagcttggaggctgaagatgctgccacttattactgccaacagtggagtagtaacccgctcacgttcggtggcgggaccaaggtggagatcaaaggcgaaggtactagtactggttctggtggaagtggaggttcaggtggagcagacgacgtccaactggtgcagtcaggggctgaagtgaaaaaacctggggcctcagtgaaggtgtcctgcaaggcttctggctacacctttactaggtacacgatgcactgggtaaggcaggcacctggacagggtctggaatggattggatacattaatcctagccgtggttatactaattacaatcagaagttcaaggaccgcgtcacaatcactacagacaaatccaccagcacagcctacatggaactgagcagcctgcgttctgaggacactgcagtctattactgtgcaagatattatgatgatcattactgccttgactactggggccaaggcaccacggtcaccgtctcctccggaggtggtggatccgagctcgtgatgacccagactccactctccctgcctgtcagtcttggagatcaagcctccatctcttgcagatctagtcagagccttgtacacagtaatggaaacacctatttacattggtacctgcagaagccaggccagtctccaaagctcctgatctacaaagtttccaaccgattttctggggtcccagacaggttcagtggcagtggatcagggacagatttcacactcaagatcagcagagtggaggctgaggatctgggagtttatttctgctctcaaagtacacatgttccgtacacgttcggaggggggaccaagcttgagatcaaaggtggtggtggttctggcggcggcggctccggtggtggtggttctgaggtgcagctgctcgagcagtctggagctgagctggcgaggcctggggcttcagtgaagctgtcctgcaaggcttctggctacaccttcacaaactatggtttaagctgggtgaagcagaggcctggacaggtccttgagtggattggagaggtttatcctagaattggtaatgcttactacaatgagaagttcaagggcaaggccacactgactgcagacaaatcctccagcacagcgtccatggagctccgcagcctgacctctgaggactctgcggtctatttctgtgcaagacggggatcctacgatactaactacgactggtacttcgatgtctggggccaagggaccacggtcaccgtctcctca

SEQ ID NO: 315 - protein, 499 aa, artificial sequence
  VL2VH7x4-7 LHLH
DIVLTQSPATLSLSPGERATLSCRASQSVSYMNWYQQKPGKAPKRWIYDTSKVASGVPARFSGSGSGTDYSLTINSLEAEDAATYYCQQWSSNPLTFGGGTKVEIKGEGTSTGSGGSGGSGGADDVQLVQSGAEVKKPGASVKVSCKASGYTFTRYTMHWVRQAPGQGLEWIGYINPSRGYTNYNQKFKDRVTITTDKSTSTAYMELSSLRSEDTAVYYCARYYDDHYCLDYWGQGTTVTVSSGGGGSELVMTQTPLSLPVSLGDQASISCRSSQSLVHSNGNTYLHWYLQKPGQSPKLLIYKVSNRFSGVPDRFSGSGSGTDFTLKISRVEAEDLGVYFCSQSTHVPYTFGGGTKLEIKGGGGSGGGGSGGGGSEVQLLEQSGAELARPGASVKLSCKASGYTFTNYGLSWVKQRPGQVLEWIGEVYPRIGNAYYNEKFKGKATLTADKSSSTASMELRSLTSEDSAVYFCARRGSYDTNYDWYFDVWGQGTTVTVSS

SEQ ID NO: 316 - DNA, 1500 bp, artificial sequence
  VH7VL2x4-7 HLLH
gacgtccaactggtgcagtcaggggctgaagtgaaaaaacctggggcctcagtgaaggtgtcctgcaaggcttctggctacacctttactaggtacacgatgcactgggtaaggcaggcacctggacagggtctggaatggattggatacattaatcctagccgtggttatactaattacaatcagaagttcaaggaccgcgtcacaatcactacagacaaatccaccagcacagcctacatggaactgagcagcctgcgttctgaggacactgcagtctattactgtgcaagatattatgatgatcattactgccttgactactggggccaaggcaccacggtcaccgtctcctcaggcgaaggtactagtactggttctggtggaagtggaggttcaggtggagcagacgacattgtactgacccagtctccagcaactctgtctctgtctccaggggagcgtgccaccctgagctgcagagccagtcaaagtgtaagttacatgaactggtaccagcagaagccgggcaaggcacccaaaagatggatttatgacacatccaaagtggcttctggagtccctgctcgcttcagtggcagtgggtctgggaccgactactctctcacaatcaacagcttggaggctgaagatgctgccacttattactgccaacagtggagtagtaacccgctcacgttcggtggcgggaccaaggtggagatcaaatccggaggtggtggatccgagctcgtgatgacccagactccactctccctgcctgtcagtcttggagatcaagcctccatctcttgcagatctagtcagagccttgtacacagtaatggaaacacctatttacattggtacctgcagaagccaggccagtctccaaagctcctgatctacaaagtttccaaccgattttctggggtcccagacaggttcagtggcagtggatcagggacagatttcacactcaagatcagcagagtggaggctgaggatctgggagtttatttctgctctcaaagtacacatgttccgtacacgttcggaggggggaccaagcttgagatcaaaggtggtggtggttctggcggcggcggctccggtggtggtggttctgaggtgcagctgctcgagcagtctggagctgagctggcgaggcctggggcttcagtgaagctgtcctgcaaggcttctggctacaccttcacaaactatggtttaagctgggtgaagcagaggcctggacaggtccttgagtggattggagaggtttatcctagaattggtaatgcttactacaatgagaagttcaagggcaaggccacactgactgcagacaaatcctccagcacagcgtccatggagctccgcagcctgacctctgaggactctgcggtctatttctgtgcaagacggggatcctacgatactaactacgactggtacttcgatgtctggggccaagggaccacggtcaccgtctcctca

SEQ ID NO: 317 - protein, 500 aa, artificial sequence
  VH7VL2x4-7 HLLH
DVQLVQSGAEVKKPGASVKVSCKASGYTFTRYTMHWVRQAPGQGLEWIGYINPSRGYTNYNQKFKDRVTITTDKSTSTAYMELSSLRSEDTAVYYCARYYDDHYCLDYWGQGTTVTVSSGEGTSTGSGGSGGSGGADDIVLTQSPATLSLSPGERATLSCRASQSVSYMNWYQQKPGKAPKRWIYDTSKVASGVPARFSGSGSGTDYSLTINSLEAEDAATYYCQQWSSNPLTFGGGTKVEIKSGGGGSELVMTQTPLSLPVSLGDQASISCRSSQSLVHSNGNTYLHWYLQKPGQSPKLLIYKVSNRFSGVPDRFSGSGSGTDFTLKISRVEAEDLGVYFCSQSTHVPYTFGGGTKLEIKGGGGSGGGGSGGGGSEVQLLEQSGAELARPGASVKLSCKASGYTFTNYGLSWVKQRPGQVLEWIGEVYPRIGNAYYNEKFKGKATLTADKSSSTASMELRSLTSEDSAVYFCARRGSYDTNYDWYFDVWGQGTTVTVSS

SEQ ID NO: 318 - DNA, 1497 bp, artificial sequence
  VL3VH7x4-7 LHHL
gacattgtactgacccagtctccagcaactctgtctctgtctccaggggagcgtgccaccctgacctgcagagccagttcaagtgtaagttacatgaactggtaccagcagaagccgggcaaggcacccaaaagatggatttatgacacatccaaagtggcttctggagtccctgctcgcttcagtggcagtgggtctgggaccgactactctctcacaatcaacagcttggaggctgaagatgctgccacttattactgccaacagtggagtagtaacccgctcacgttcggtggcgggaccaaggtggagatcaaaggcgaaggtactagtactggttctggtggaagtggaggttcaggtggagcagacgacgtccaactggtgcagtcaggggctgaagtgaaaaaacctggggcctcagtgaaggtgtcctgcaaggcttctggctacacctttactaggtacacgatgcactgggtaaggcaggcacctggacagggtctggaatggattggatacattaatcctagccgtggttatactaattacaatcagaagttcaaggaccgcgtcacaatcactacagacaaatccaccagcacagcctacatggaactgagcagcctgcgttctgaggacactgcagtctattactgtgcaagatattatgatgatcattactgccttgactactggggccaaggcaccacggtcaccgtctcctccggaggtggtggatccgaggtgcagctgctcgagcagtctggagctgagctggcgaggcctggggcttcagtgaagctgtcctgcaaggcttctggctacaccttcacaaactatggtttaagctgggtgaagcagaggcctggacaggtccttgagtggattggagaggtttatcctagaattggtaatgcttactacaatgagaagttcaagggcaaggccacactgactgcagacaaatcctccagcacagcgtccatggagctccgcagcctgacctctgaggactctgcggtctatttctgtgcaagacggggatcctacgatactaactacgactggtacttcgatgtctggggccaagggaccacggtcaccgtctcctcaggtggtggtggttctggcggcggcggctccggtggtggtggttctgagctcgtgatgacccagactccactctccctgcctgtcagtcttggagatcaagcctccatctcttgcagatctagtcagagccttgtacacagtaatggaaacacctatttacattggtacctgcagaagccaggccagtctccaaagctcctgatctacaaagtttccaaccgattttctggggtcccagacaggttcagtggcagtggatcagggacagatttcacactcaagatcagcagagtggaggctgaggatctgggagtttatttctgctctcaaagtacacatgttccgtacacgttcggaggggggaccaagcttgagatcaaa

SEQ ID NO: 319 - protein, 499 aa, artificial sequence
  VL3VH7x4-7 LHHL
DIVLTQSPATLSLSPGERATLTCRASSSVSYMNWYQQKPGKAPKRWIYDTSKVASGVPARFSGSGSGTDYSLTINSLEAEDAATYYCQQWSSNPLTFGGGTKVEIKGEGTSTGSGGSGGSGGADDVQLVQSGAEVKKPGASVKVSCKASGYTFTRYTMHWVRQAPGQGLEWIGYINPSRGYTNYNQKFKDRVTITTDKSTSTAYMELSSLRSEDTAVYYCARYYDDHYCLDYWGQGTTVTVSSGGGGSEVQLLEQSGAELARPGASVKLSCKASGYTFTNYGLSWVKQRPGQVLEWIGEVYPRIGNAYYNEKFKGKATLTADKSSSTASMELRSLTSEDSAVYFCARRGSYDTNYDWYFDVWGQGTTVTVSSGGGGSGGGGSGGGGSELVMTQTPLSLPVSLGDQASISCRSSQSLVHSNGNTYLHWYLQKPGQSPKLLIYKVSNRFSGVPDRFSGSGSGTDFTLKISRVEAEDLGVYFCSQSTHVPYTFGGGTKLEIK

SEQ ID NO: 320 - DNA, 1500 bp, artificial sequence
  VH7VL3x4-7 HLHL
gacgtccaactggtgcagtcaggggctgaagtgaaaaaacctggggcctcagtgaaggtgtcctgcaaggcttctggctacacctttactaggtacacgatgcactgggtaaggcaggcacctggacagggtctggaatggattggatacattaatcctagccgtggttatactaattacaatcagaagttcaaggaccgcgtcacaatcactacagacaaatccaccagcacagcctacatggaactgagcagcctgcgttctgaggacactgcagtctattactgtgcaagatattatgatgatcattactgccttgactactggggccaaggcaccacggtcaccgtctcctcaggcgaaggtactagtactggttctggtggaagtggaggttcaggtggagcagacgacattgtactgacccagtctccagcaactctgtctctgtctccaggggagcgtgccaccctgacctgcagagccagttcaagtgtaagttacatgaactggtaccagcagaagccgggcaaggcacccaaaagatggatttatgacacatccaaagtggcttctggagtccctgctcgcttcagtggcagtgggtctgggaccgactactctctcacaatcaacagcttggaggctgaagatgctgccacttattactgccaacagtggagtagtaacccgctcacgttcggtggcgggaccaaggtggagatcaaatccggaggtggtggatccgaggtgcagctgctcgagcagtctggagctgagctggcgaggcctggggcttcagtgaagctgtcctgcaaggcttctggctacaccttcacaaactatggtttaagctgggtgaagcagaggcctggacaggtccttgagtggattggagaggtttatcctagaattggtaatgcttactacaatgagaagttcaagggcaaggccacactgactgcagacaaatcctccagcacagcgtccatggagctccgcagcctgacctctgaggactctgcggtctatttctgtgcaagacggggatcctacgatactaactacgactggtacttcgatgtctggggccaagggaccacggtcaccgtctcctcaggtggtggtggttctggcggcggcggctccggtggtggtggttctgagctcgtgatgacccagactccactctccctgcctgtcagtcttggagatcaagcctccatctcttgcagatctagtcagagccttgtacacagtaatggaaacacctatttacattggtacctgcagaagccaggccagtctccaaagctcctgatctacaaagtttccaaccgattttctggggtcccagacaggttcagtggcagtggatcagggacagatttcacactcaagatcagcagagtggaggctgaggatctgggagtttatttctgctctcaaagtacacatgttccgtacacgttcggaggggggaccaagcttgagatcaaa

SEQ ID NO: 321 - protein, 500 aa, artificial sequence
  VH7VL3x4-7 HLHL
DVQLVQSGAEVKKPGASVKVSCKASGYTFTRYTMHWVRQAPGQGLEWIGYINPSRGYTNYNQKFKDRVTITTDKSTSTAYMELSSLRSEDTAVYYCARYYDDHYCLDYWGQGTTVTVSSGEGTSTGSGGSGGSGGADDIVLTQSPATLSLSPGERATLTCRASSSVSYMNWYQQKPGKAPKRWIYDTSKVASGVPARFSGSGSGTDYSLTINSLEAEDAATYYCQQWSSNPLTFGGGTKVEIKSGGGGSEVQLLEQSGAELARPGASVKLSCKASGYTFTNYGLSWVKQRPGQVLEWIGEVYPRIGNAYYNEKFKGKATLTADKSSSTASMELRSLTSEDSAVYFCARRGSYDTNYDWYFDVWGQGTTVTVSSGGGGSGGGGSGGGGSELVMTQTPLSLPVSLGDQASISCRSSQSLVHSNGNTYLHWYLQKPGQSPKLLIYKVSNRFSGVPDRFSGSGSGTDFTLKISRVEAEDLGVYFCSQSTHVPYTFGGGTKLEIK

SEQ ID NO: 322 - DNA, 1497 bp, artificial sequence
  VL3VH7x4-7 LHLH
gacattgtactgacccagtctccagcaactctgtctctgtctccaggggagcgtgccaccctgacctgcagagccagttcaagtgtaagttacatgaactggtaccagcagaagccgggcaaggcacccaaaagatggatttatgacacatccaaagtggcttctggagtccctgctcgcttcagtggcagtgggtctgggaccgactactctctcacaatcaacagcttggaggctgaagatgctgccacttattactgccaacagtggagtagtaacccgctcacgttcggtggcgggaccaaggtggagatcaaaggcgaaggtactagtactggttctggtggaagtggaggttcaggtggagcagacgacgtccaactggtgcagtcaggggctgaagtgaaaaaacctggggcctcagtgaaggtgtcctgcaaggcttctggctacacctttactaggtacacgatgcactgggtaaggcaggcacctggacagggtctggaatggattggatacattaatcctagccgtggttatactaattacaatcagaagttcaaggaccgcgtcacaatcactacagacaaatccaccagcacagcctacatggaactgagcagcctgcgttctgaggacactgcagtctattactgtgcaagatattatgatgatcattactgccttgactactggggccaaggcaccacggtcaccgtctcctccggaggtggtggatccgagctcgtgatgacccagactccactctccctgcctgtcagtcttggagatcaagcctccatctcttgcagatctagtcagagccttgtacacagtaatggaaacacctatttacattggtacctgcagaagccaggccagtctccaaagctcctgatctacaaagtttccaaccgattttctggggtcccagacaggttcagtggcagtggatcagggacagatttcacactcaagatcagcagagtggaggctgaggatctgggagtttatttctgctctcaaagtacacatgttccgtacacgttcggaggggggaccaagcttgagatcaaaggtggtggtggttctggcggcggcggctccggtggtggtggttctgaggtgcagctgctcgagcagtctggagctgagctggcgaggcctggggcttcagtgaagctgtcctgcaaggcttctggctacaccttcacaaactatggtttaagctgggtgaagcagaggcctggacaggtccttgagtggattggagaggtttatcctagaattggtaatgcttactacaatgagaagttcaagggcaaggccacactgactgcagacaaatcctccagcacagcgtccatggagctccgcagcctgacctctgaggactctgcggtctatttctgtgcaagacggggatcctacgatactaactacgactggtacttcgatgtctggggccaagggaccacggtcaccgtctcctca

SEQ ID NO: 323 - protein, 499 aa, artificial sequence
  VL3VH7x4-7 LHLH
DIVLTQSPATLSLSPGERATLTCRASSSVSYMNWYQQKPGKAPKRWIYDTSKVASGVPARFSGSGSGTDYSLTINSLEAEDAATYYCQQWSSNPLTFGGGTKVEIKGEGTSTGSGGSGGSGGADDVQLVQSGAEVKKPGASVKVSCKASGYTFTRYTMHWVRQAPGQGLEWIGYINPSRGYTNYNQKFKDRVTITTDKSTSTAYMELSSLRSEDTAVYYCARYYDDHYCLDYWGQGTTVTVSSGGGGSELVMTQTPLSLPVSLGDQASISCRSSQSLVHSNGNTYLHWYLQKPGQSPKLLIYKVSNRFSGVPDRFSGSGSGTDFTLKISRVEAEDLGVYFCSQSTHVPYTFGGGTKLEIKGGGGSGGGGSGGGGSEVQLLEQSGAELARPGASVKLSCKASGYTFTNYGLSWVKQRPGQVLEWIGEVYPRIGNAYYNEKFKGKATLTADKSSSTASMELRSLTSEDSAVYFCARRGSYDTNYDWYFDVWGQGTTVTVSS

SEQ ID NO: 324 - DNA, 1500 bp, artificial sequence
  VH7VL3x4-7 HLLH
gacgtccaactggtgcagtcaggggctgaagtgaaaaaacctggggcctcagtgaaggtgtcctgcaaggcttctggctacacctttactaggtacacgatgcactgggtaaggcaggcacctggacagggtctggaatggattggatacattaatcctagccgtggttatactaattacaatcagaagttcaaggaccgcgtcacaatcactacagacaaatccaccagcacagcctacatggaactgagcagcctgcgttctgaggacactgcagtctattactgtgcaagatattatgatgatcattactgccttgactactggggccaaggcaccacggtcaccgtctcctcaggcgaaggtactagtactggttctggtggaagtggaggttcaggtggagcagacgacattgtactgacccagtctccagcaactctgtctctgtctccaggggagcgtgccaccctgacctgcagagccagttcaagtgtaagttacatgaactggtaccagcagaagccgggcaaggcacccaaaagatggatttatgacacatccaaagtggcttctggagtccctgctcgcttcagtggcagtgggtctgggaccgactactctctcacaatcaacagcttggaggctgaagatgctgccacttattactgccaacagtggagtagtaacccgctcacgttcggtggcgggaccaaggtggagatcaaatccggaggtggtggatccgagctcgtgatgacccagactccactctccctgcctgtcagtcttggagatcaagcctccatctcttgcagatctagtcagagccttgtacacagtaatggaaacacctatttacattggtacctgcagaagccaggccagtctccaaagctcctgatctacaaagtttccaaccgattttctggggtcccagacaggttcagtggcagtggatcagggacagatttcacactcaagatcagcagagtggaggctgaggatctgggagtttatttctgctctcaaagtacacatgttccgtacacgttcggaggggggaccaagcttgagatcaaaggtggtggtggttctggcggcggcggctccggtggtggtggttctgaggtgcagctgctcgagcagtctggagctgagctggcgaggcctggggcttcagtgaagctgtcctgcaaggcttctggctacaccttcacaaactatggtttaagctgggtgaagcagaggcctggacaggtccttgagtggattggagaggtttatcctagaattggtaatgcttactacaatgagaagttcaagggcaaggccacactgactgcagacaaatcctccagcacagcgtccatggagctccgcagcctgacctctgaggactctgcggtctatttctgtgcaagacggggatcctacgatactaactacgactggtacttcgatgtctggggccaagggaccacggtcaccgtctcctca

SEQ ID NO: 325 - protein, 500 aa, artificial sequence
  VH7VL3x4-7 HLLH
DVQLVQSGAEVKKPGASVKVSCKASGYTFTRYTMHWVRQAPGQGLEWIGYINPSRGYTNYNQKFKDRVTITTDKSTSTAYMELSSLRSEDTAVYYCARYYDDHYCLDYWGQGTTVTVSSGEGTSTGSGGSGGSGGADDIVLTQSPATLSLSPGERATLTCRASSSVSYMNWYQQKPGKAPKRWIYDTSKVASGVPARFSGSGSGTDYSLTINSLEAEDAATYYCQQWSSNPLTFGGGTKVEIKSGGGGSELVMTQTPLSLPVSLGDQASISCRSSQSLVHSNGNTYLHWYLQKPGQSPKLLIYKVSNRFSGVPDRFSGSGSGTDFTLKISRVEAEDLGVYFCSQSTHVPYTFGGGTKLEIKGGGGSGGGGSGGGGSEVQLLEQSGAELARPGASVKLSCKASGYTFTNYGLSWVKQRPGQVLEWIGEVYPRIGNAYYNEKFKGKATLTADKSSSTASMELRSLTSEDSAVYFCARRGSYDTNYDWYFDVWGQGTTVTVSS

SEQ ID NO: 326 - DNA, 1494 bp, artificial sequence
  VL1VH5xCD19 LHHL
gacattcagatgacccagtctccatctagcctgtctgcatctgtcggggaccgtgtcaccatcacctgcagagccagtcaaagtgtaagttacatgaactggtaccagcagaagccgggcaaggcacccaaaagatggatttatgacacatccaaagtggcttctggagtccctgctcgcttcagtggcagtgggtctgggaccgactactctctcacaatcaacagcttggaggctgaagatgctgccacttattactgccaacagtggagtagtaacccgctcacgttcggtggcgggaccaaggtggagatcaaaggcgaaggtactagtactggttctggtggaagtggaggttcaggtggagcagacgacgtccaactggtgcagtcaggggctgaagtgaaaaaacctggggcctcagtgaaggtgtcctgcaaggcttctggctacacctttactaggtacacgatgcactgggtaaggcaggcacctggacagggtctggaatggattggatacattaatcctagccgtggttatactaattacgcagacagcgtcaagggccgcttcacaatcactacagacaaatccaccagcacagcctacatggaactgagcagcctgcgttctgaggacactgcaacctattactgtgcaagatattatgatgatcattactgccttgactactggggccaaggcaccacggtcaccgtctcctccggaggtggtggatcccaggtgcagctgcagcagtctggggctgagctggtgaggcctgggtcctcagtgaagatttcctgcaaggcttctggctatgcattcagtagctactggatgaactgggtgaagcagaggcctggacagggtcttgagtggattggacagatttggcctggagatggtgatactaactacaatggaaagttcaagggtaaagccactctgactgcagacgaatcctccagcacagcctacatgcaactcagcagcctagcatctgaggactctgcggtctatttctgtgcaagacgggagactacgacggtaggccgttattactatgctatggactactggggccaagggaccacggtcaccgtctcctccggtggtggtggttctggcggcggcggctccggtggtggtggttctgatatccagctgacccagtctccagcttctttggctgtgtctctagggcagagggccaccatctcctgcaaggccagccaaagtgttgattatgatggtgatagttatttgaactggtaccaacagattccaggacagccacccaaactcctcatctatgatgcatccaatctagtttctgggatcccacccaggtttagtggcagtgggtctgggacagacttcaccctcaacatccatcctgtggagaaggtggatgctgcaacctatcactgtcagcaaagtactgaggatccgtggacgttcggtggagggaccaagctcgagatcaaa

SEQ ID NO: 327 - protein, 498 aa, artificial sequence
  VL1VH5xCD19 LHHL
DIQMTQSPSSLSASVGDRVTITCRASQSVSYMNWYQQKPGKAPKRWIYDTSKVASGVPARFSGSGSGTDYSLTINSLEAEDAATYYCQQWSSNPLTFGGGTKVEIKGEGTSTGSGGSGGSGGADDVQLVQSGAEVKKPGASVKVSCKASGYTFTRYTMHWVRQAPGQGLEWIGYINPSRGYTNYADSVKGRFTITTDKSTSTAYMELSSLRSEDTATYYCARYYDDHYCLDYWGQGTTVTVSSGGGGSQVQLQQSGAELVRPGSSVKISCKASGYAFSSYWMNWVKQRPGQGLEWIGQIWPGDGDTNYNGKFKGKATLTADESSSTAYMQLSSLASEDSAVYFCARRETTTVGRYYYAMDYWGQGTTVTVSSGGGGSGGGGSGGGGSDIQLTQSPASLAVSLGQRATISCKASQSVDYDGDSYLNWYQQIPGQPPKLLIYDASNLVSGIPPRFSGSGSGTDFTLNIHPVEKVDAATYHCQQSTEDPWTFGGGTKLEIK

SEQ ID NO: 328 - DNA, 1497 bp, artificial sequence
  VH5VL1xCD19 HLHL
gacgtccaactggtgcagtcaggggctgaagtgaaaaaacctggggcctcagtgaaggtgtcctgcaaggcttctggctacacctttactaggtacacgatgcactgggtaaggcaggcacctggacagggtctggaatggattggatacattaatcctagccgtggttatactaattacgcagacagcgtcaagggccgcttcacaatcactacagacaaatccaccagcacagcctacatggaactgagcagcctgcgttctgaggacactgcaacctattactgtgcaagatattatgatgatcattactgccttgactactggggccaaggcaccacggtcaccgtctcctcaggcgaaggtactagtactggttctggtggaagtggaggttcaggtggagcagacgacattcagatgacccagtctccatctagcctgtctgcatctgtcggggaccgtgtcaccatcacctgcagagccagtcaaagtgtaagttacatgaactggtaccagcagaagccgggcaaggcacccaaaagatggatttatgacacatccaaagtggcttctggagtccctgctcgcttcagtggcagtgggtctgggaccgactactctctcacaatcaacagcttggaggctgaagatgctgccacttattactgccaacagtggagtagtaacccgctcacgttcggtggcgggaccaaggtggagatcaaatccggaggtggtggatcccaggtgcagctgcagcagtctggggctgagctggtgaggcctgggtcctcagtgaagatttcctgcaaggcttctggctatgcattcagtagctactggatgaactgggtgaagcagaggcctggacagggtcttgagtggattggacagatttggcctggagatggtgatactaactacaatggaaagttcaagggtaaagccactctgactgcagacgaatcctccagcacagcctacatgcaactcagcagcctagcatctgaggactctgcggtctatttctgtgcaagacgggagactacgacggtaggccgttattactatgctatggactactggggccaagggaccacggtcaccgtctcctccggtggtggtggttctggcggcggcggctccggtggtggtggttctgatatccagctgacccagtctccagcttctttggctgtgtctctagggcagagggccaccatctcctgcaaggccagccaaagtgttgattatgatggtgatagttatttgaactggtaccaacagattccaggacagccacccaaactcctcatctatgatgcatccaatctagtttctgggatcccacccaggtttagtggcagtgggtctgggacagacttcaccctcaacatccatcctgtggagaaggtggatgctgcaacctatcactgtcagcaaagtactgaggatccgtggacgttcggtggagggaccaagctcgagatcaaa

SEQ ID NO: 329 - protein, 499 aa, artificial sequence
  VH5VL1xCD19 HLHL
DVQLVQSGAEVKKPGASVKVSCKASGYTFTRYTMHWVRQAPGQGLEWIGYINPSRGYTNYADSVKGRFTITTDKSTSTAYMELSSLRSEDTATYYCARYYDDHYCLDYWGQGTTVTVSSGEGTSTGSGGSGGSGGADDIQMTQSPSSLSASVGDRVTITCRASQSVSYMNWYQQKPGKAPKRWIYDTSKVASGVPARFSGSGSGTDYSLTINSLEAEDAATYYCQQWSSNPLTFGGGTKVEIKSGGGGSQVQLQQSGAELVRPGSSVKISCKASGYAFSSYWMNWVKQRPGQGLEWIGQIWPGDGDTNYNGKFKGKATLTADESSSTAYMQLSSLASEDSAVYFCARRETTTVGRYYYAMDYWGQGTTVTVSSGGGGSGGGGSGGGGSDIQLTQSPASLAVSLGQRATISCKASQSVDYDGDSYLNWYQQIPGQPPKLLIYDASNLVSGIPPRFSGSGSGTDFTLNIHPVEKVDAATYHCQQSTEDPWTFGGGTKLEIK

SEQ ID NO: 330 - DNA, 1494 bp, artificial sequence
  VL1VH5xCD19 LHLH
gacattcagatgacccagtctccatctagcctgtctgcatctgtcggggaccgtgtcaccatcacctgcagagccagtcaaagtgtaagttacatgaactggtaccagcagaagccgggcaaggcacccaaaagatggatttatgacacatccaaagtggcttctggagtccctgctcgcttcagtggcagtgggtctgggaccgactactctctcacaatcaacagcttggaggctgaagatgctgccacttattactgccaacagtggagtagtaacccgctcacgttcggtggcgggaccaaggtggagatcaaaggcgaaggtactagtactggttctggtggaagtggaggttcaggtggagcagacgacgtccaactggtgcagtcaggggctgaagtgaaaaaacctggggcctcagtgaaggtgtcctgcaaggcttctggctacacctttactaggtacacgatgcactgggtaaggcaggcacctggacagggtctggaatggattggatacattaatcctagccgtggttatactaattacgcagacagcgtcaagggccgcttcacaatcactacagacaaatccaccagcacagcctacatggaactgagcagcctgcgttctgaggacactgcaacctattactgtgcaagatattatgatgatcattactgccttgactactggggccaaggcaccacggtcaccgtctcctccggaggtggtggatccgatatccagctgacccagtctccagcttctttggctgtgtctctagggcagagggccaccatctcctgcaaggccagccaaagtgttgattatgatggtgatagttatttgaactggtaccaacagattccaggacagccacccaaactcctcatctatgatgcatccaatctagtttctgggatcccacccaggtttagtggcagtgggtctgggacagacttcaccctcaacatccatcctgtggagaaggtggatgctgcaacctatcactgtcagcaaagtactgaggatccgtggacgttcggtggagggaccaagctcgagatcaaaggtggtggtggttctggcggcggcggctccggtggtggtggttctcaggtgcagctgcagcagtctggggctgagctggtgaggcctgggtcctcagtgaagatttcctgcaaggcttctggctatgcattcagtagctactggatgaactgggtgaagcagaggcctggacagggtcttgagtggattggacagatttggcctggagatggtgatactaactacaatggaaagttcaagggtaaagccactctgactgcagacgaatcctccagcacagcctacatgcaactcagcagcctagcatctgaggactctgcggtctatttctgtgcaagacgggagactacgacggtaggccgttattactatgctatggactactggggccaagggaccacggtcaccgtctcctcc

SEQ ID NO: 331 - protein, 498 aa, artificial sequence
  VL1VH5xCD19 LHLH
DIQMTQSPSSLSASVGDRVTITCRASQSVSYMNWYQQKPGKAPKRWIYDTSKVASGVPARFSGSGSGTDYSLTINSLEAEDAATYYCQQWSSNPLTFGGGTKVEIKGEGTSTGSGGSGGSGGADDVQLVQSGAEVKKPGASVKVSCKASGYTFTRYTMHWVRQAPGQGLEWIGYINPSRGYTNYADSVKGRFTITTDKSTSTAYMELSSLRSEDTATYYCARYYDDHYCLDYWGQGTTVTVSSGGGGSDIQLTQSPASLAVSLGQRATISCKASQSVDYDGDSYLNWYQQIPGQPPKLLIYDASNLVSGIPPRFSGSGSGTDFTLNIHPVEKVDAATYHCQQSTEDPWTFGGGTKLEIKGGGGSGGGGSGGGGSQVQLQQSGAELVRPGSSVKISCKASGYAFSSYWMNWVKQRPGQGLEWIGQIWPGDGDTNYNGKFKGKATLTADESSSTAYMQLSSLASEDSAVYFCARRETTTVGRYYYAMDYWGQGTTVTVSS

SEQ ID NO: 332 - DNA, 1497 bp, artificial sequence
  VH5VL1xCD19 HLLH
gacgtccaactggtgcagtcaggggctgaagtgaaaaaacctggggcctcagtgaaggtgtcctgcaaggcttctggctacacctttactaggtacacgatgcactgggtaaggcaggcacctggacagggtctggaatggattggatacattaatcctagccgtggttatactaattacgcagacagcgtcaagggccgcttcacaatcactacagacaaatccaccagcacagcctacatggaactgagcagcctgcgttctgaggacactgcaacctattactgtgcaagatattatgatgatcattactgccttgactactggggccaaggcaccacggtcaccgtctcctcaggcgaaggtactagtactggttctggtggaagtggaggttcaggtggagcagacgacattcagatgacccagtctccatctagcctgtctgcatctgtcggggaccgtgtcaccatcacctgcagagccagtcaaagtgtaagttacatgaactggtaccagcagaagccgggcaaggcacccaaaagatggatttatgacacatccaaagtggcttctggagtccctgctcgcttcagtggcagtgggtctgggaccgactactctctcacaatcaacagcttggaggctgaagatgctgccacttattactgccaacagtggagtagtaacccgctcacgttcggtggcgggaccaaggtggagatcaaatccggaggtggtggatccgatatccagctgacccagtctccagcttctttggctgtgtctctagggcagagggccaccatctcctgcaaggccagccaaagtgttgattatgatggtgatagttatttgaactggtaccaacagattccaggacagccacccaaactcctcatctatgatgcatccaatctagtttctgggatcccacccaggtttagtggcagtgggtctgggacagacttcaccctcaacatccatcctgtggagaaggtggatgctgcaacctatcactgtcagcaaagtactgaggatccgtggacgttcggtggagggaccaagctcgagatcaaaggtggtggtggttctggcggcggcggctccggtggtggtggttctcaggtgcagctgcagcagtctggggctgagctggtgaggcctgggtcctcagtgaagatttcctgcaaggcttctggctatgcattcagtagctactggatgaactgggtgaagcagaggcctggacagggtcttgagtggattggacagatttggcctggagatggtgatactaactacaatggaaagttcaagggtaaagccactctgactgcagacgaatcctccagcacagcctacatgcaactcagcagcctagcatctgaggactctgcggtctatttctgtgcaagacgggagactacgacggtaggccgttattactatgctatggactactggggccaagggaccacggtcaccgtctcctcc

SEQ ID NO: 333 - protein, 499 aa, artificial sequence
  VH5VL1xCD19 HLLH
DVQLVQSGAEVKKPGASVKVSCKASGYTFTRYTMHWVRQAPGQGLEWIGYINPSRGYTNYADSVKGRFTITTDKSTSTAYMELSSLRSEDTATYYCARYYDDHYCLDYWGQGTTVTVSSGEGTSTGSGGSGGSGGADDIQMTQSPSSLSASVGDRVTITCRASQSVSYMNWYQQKPGKAPKRWIYDTSKVASGVPARFSGSGSGTDYSLTINSLEAEDAATYYCQQWSSNPLTFGGGTKVEIKSGGGGSDIQLTQSPASLAVSLGQRATISCKASQSVDYDGDSYLNWYQQIPGQPPKLLIYDASNLVSGIPPRFSGSGSGTDFTLNIHPVEKVDAATYHCQQSTEDPWTFGGGTKLEIKGGGGSGGGGSGGGGSQVQLQQSGAELVRPGSSVKISCKASGYAFSSYWMNWVKQRPGQGLEWIGQIWPGDGDTNYNGKFKGKATLTADESSSTAYMQLSSLASEDSAVYFCARRETTTVGRYYYAMDYWGQGTTVTVSS

SEQ ID NO: 334 - DNA, 1494 bp, artificial sequence
  VL2/VH5xCD19 LHHL
gacattgtactgacccagtctccagcaactctgtctctgtctccaggggagcgtgccaccctgagctgcagagccagtcaaagtgtaagttacatgaactggtaccagcagaagccgggcaaggcacccaaaagatggatttatgacacatccaaagtggcttctggagtccctgctcgcttcagtggcagtgggtctgggaccgactactctctcacaatcaacagcttggaggctgaagatgctgccacttattactgccaacagtggagtagtaacccgctcacgttcggtggcgggaccaaggtggagatcaaaggcgaaggtactagtactggttctggtggaagtggaggttcaggtggagcagacgacgtccaactggtgcagtcaggggctgaagtgaaaaaacctggggcctcagtgaaggtgtcctgcaaggcttctggctacacctttactaggtacacgatgcactgggtaaggcaggcacctggacagggtctggaatggattggatacattaatcctagccgtggttatactaattacgcagacagcgtcaagggccgcttcacaatcactacagacaaatccaccagcacagcctacatggaactgagcagcctgcgttctgaggacactgcaacctattactgtgcaagatattatgatgatcattactgccttgactactggggccaaggcaccacggtcaccgtctcctccggaggtggtggatcccaggtgcagctgcagcagtctggggctgagctggtgaggcctgggtcctcagtgaagatttcctgcaaggcttctggctatgcattcagtagctactggatgaactgggtgaagcagaggcctggacagggtcttgagtggattggacagatttggcctggagatggtgatactaactacaatggaaagttcaagggtaaagccactctgactgcagacgaatcctccagcacagcctacatgcaactcagcagcctagcatctgaggactctgcggtctatttctgtgcaagacgggagactacgacggtaggccgttattactatgctatggactactggggccaagggaccacggtcaccgtctcctccggtggtggtggttctggcggcggcggctccggtggtggtggttctgatatccagctgacccagtctccagcttctttggctgtgtctctagggcagagggccaccatctcctgcaaggccagccaaagtgttgattatgatggtgatagttatttgaactggtaccaacagattccaggacagccacccaaactcctcatctatgatgcatccaatctagtttctgggatcccacccaggtttagtggcagtgggtctgggacagacttcaccctcaacatccatcctgtggagaaggtggatgctgcaacctatcactgtcagcaaagtactgaggatccgtggacgttcggtggagggaccaagctcgagatcaaa

SEQ ID NO: 335 - protein, 498 aa, artificial sequence
  VL2/VH5xCD19 LHHL
DIVLTQSPATLSLSPGERATLSCRASQSVSYMNWYQQKPGKAPKRWIYDTSKVASGVPARFSGSGSGTDYSLTINSLEAEDAATYYCQQWSSNPLTFGGGTKVEIKGEGTSTGSGGSGGSGGADDVQLVQSGAEVKKPGASVKVSCKASGYTFTRYTMHWVRQAPGQGLEWIGYINPSRGYTNYADSVKGRFTITTDKSTSTAYMELSSLRSEDTATYYCARYYDDHYCLDYWGQGTTVTVSSGGGGSQVQLQQSGAELVRPGSSVKISCKASGYAFSSYWMNWVKQRPGQGLEWIGQIWPGDGDTNYNGKFKGKATLTADESSSTAYMQLSSLASEDSAVYFCARRETTTVGRYYYAMDYWGQGTTVTVSSGGGGSGGGGSGGGGSDIQLTQSPASLAVSLGQRATISCKASQSVDYDGDSYLNWYQQIPGQPPKLLIYDASNLVSGIPPRFSGSGSGTDFTLNIHPVEKVDAATYHCQQSTEDPWTFGGGTKLEIK

SEQ ID NO: 336 - DNA, 1497 bp, artificial sequence
  VH5VL2xCD19 HLHL
gacgtccaactggtgcagtcaggggctgaagtgaaaaaacctggggcctcagtgaaggtgtcctgcaaggcttctggctacacctttactaggtacacgatgcactgggtaaggcaggcacctggacagggtctggaatggattggatacattaatcctagccgtggttatactaattacgcagacagcgtcaagggccgcttcacaatcactacagacaaatccaccagcacagcctacatggaactgagcagcctgcgttctgaggacactgcaacctattactgtgcaagatattatgatgatcattactgccttgactactggggccaaggcaccacggtcaccgtctcctcaggcgaaggtactagtactggttctggtggaagtggaggttcaggtggagcagacgacattgtactgacccagtctccagcaactctgtctctgtctccaggggagcgtgccaccctgagctgcagagccagtcaaagtgtaagttacatgaactggtaccagcagaagccgggcaaggcacccaaaagatggatttatgacacatccaaagtggcttctggagtccctgctcgcttcagtggcagtgggtctgggaccgactactctctcacaatcaacagcttggaggctgaagatgctgccacttattactgccaacagtggagtagtaacccgctcacgttcggtggcgggaccaaggtggagatcaaatccggaggtggtggatcccaggtgcagctgcagcagtctggggctgagctggtgaggcctgggtcctcagtgaagatttcctgcaaggcttctggctatgcattcagtagctactggatgaactgggtgaagcagaggcctggacagggtcttgagtggattggacagatttggcctggagatggtgatactaactacaatggaaagttcaagggtaaagccactctgactgcagacgaatcctccagcacagcctacatgcaactcagcagcctagcatctgaggactctgcggtctatttctgtgcaagacgggagactacgacggtaggccgttattactatgctatggactactggggccaagggaccacggtcaccgtctcctccggtggtggtggttctggcggcggcggctccggtggtggtggttctgatatccagctgacccagtctccagcttctttggctgtgtctctagggcagagggccaccatctcctgcaaggccagccaaagtgttgattatgatggtgatagttatttgaactggtaccaacagattccaggacagccacccaaactcctcatctatgatgcatccaatctagtttctgggatcccacccaggtttagtggcagtgggtctgggacagacttcaccctcaacatccatcctgtggagaaggtggatgctgcaacctatcactgtcagcaaagtactgaggatccgtggacgttcggtggagggaccaagctcgagatcaaa

SEQ ID NO: 337 - protein, 499 aa, artificial sequence
  VH5VL2xCD19 HLHL
DVQLVQSGAEVKKPGASVKVSCKASGYTFTRYTMHWVRQAPGQGLEWIGYINPSRGYTNYADSVKGRFTITTDKSTSTAYMELSSLRSEDTATYYCARYYDDHYCLDYWGQGTTVTVSSGEGTSTGSGGSGGSGGADDIVLTQSPATLSLSPGERATLSCRASQSVSYMNWYQQKPGKAPKRWIYDTSKVASGVPARFSGSGSGTDYSLTINSLEAEDAATYYCQQWSSNPLTFGGGTKVEIKSGGGGSQVQLQQSGAELVRPGSSVKISCKASGYAFSSYWMNWVKQRPGQGLEWIGQIWPGDGDTNYNGKFKGKATLTADESSSTAYMQLSSLASEDSAVYFCARRETTTVGRYYYAMDYWGQGTTVTVSSGGGGSGGGGSGGGGSDIQLTQSPASLAVSLGQRATISCKASQSVDYDGDSYLNWYQQIPGQPPKLLIYDASNLVSGIPPRFSGSGSGTDFTLNIHPVEKVDAATYHCQQSTEDPWTFGGGTKLEIK

SEQ ID NO: 338 - DNA, 1494 bp, artificial sequence
  VL2/VH5xCD19
gacattgtactgacccagtctccagcaactctgtctctgtctccaggggagcgtgccaccctgagctgcagagccagtcaaagtgtaagttacatgaactggtaccagcagaagccgggcaaggcacccaaaagatggatttatgacacatccaaagtggcttctggagtccctgctcgcttcagtggcagtgggtctgggaccgactactctctcacaatcaacagcttggaggctgaagatgctgccacttattactgccaacagtggagtagtaacccgctcacgttcggtggcgggaccaaggtggagatcaaaggcgaaggtactagtactggttctggtggaagtggaggttcaggtggagcagacgacgtccaactggtgcagtcaggggctgaagtgaaaaaacctggggcctcagtgaaggtgtcctgcaaggcttctggctacacctttactaggtacacgatgcactgggtaaggcaggcacctggacagggtctggaatggattggatacattaatcctagccgtggttatactaattacgcagacagcgtcaagggccgcttcacaatcactacagacaaatccaccagcacagcctacatggaactgagcagcctgcgttctgaggacactgcaacctattactgtgcaagatattatgatgatcattactgccttgactactggggccaaggcaccacggtcaccgtctcctccggaggtggtggatccgatatccagctgacccagtctccagcttctttggctgtgtctctagggcagagggccaccatctcctgcaaggccagccaaagtgttgattatgatggtgatagttatttgaactggtaccaacagattccaggacagccacccaaactcctcatctatgatgcatccaatctagtttctgggatcccacccaggtttagtggcagtgggtctgggacagacttcaccctcaacatccatcctgtggagaaggtggatgctgcaacctatcactgtcagcaaagtactgaggatccgtggacgttcggtggagggaccaagctcgagatcaaaggtggtggtggttctggcggcggcggctccggtggtggtggttctcaggtgcagctgcagcagtctggggctgagctggtgaggcctgggtcctcagtgaagatttcctgcaaggcttctggctatgcattcagtagctactggatgaactgggtgaagcagaggcctggacagggtcttgagtggattggacagatttggcctggagatggtgatactaactacaatggaaagttcaagggtaaagccactctgactgcagacgaatcctccagcacagcctacatgcaactcagcagcctagcatctgaggactctgcggtctatttctgtgcaagacgggagactacgacggtaggccgttattactatgctatggactactggggccaagggaccacggtcaccgtctcctcc

SEQ ID NO: 339 - protein, 498 aa, artificial sequence
  VL2/VH5xCD19
DIVLTQSPATLSLSPGERATLSCRASQSVSYMNWYQQKPGKAPKRWIYDTSKVASGVPARFSGSGSGTDYSLTINSLEAEDAATYYCQQWSSNPLTFGGGTKVEIKGEGTSTGSGGSGGSGGADDVQLVQSGAEVKKPGASVKVSCKASGYTFTRYTMHWVRQAPGQGLEWIGYINPSRGYTNYADSVKGRFTITTDKSTSTAYMELSSLRSEDTATYYCARYYDDHYCLDYWGQGTTVTVSSGGGGSDIQLTQSPASLAVSLGQRATISCKASQSVDYDGDSYLNWYQQIPGQPPKLLIYDASNLVSGIPPRFSGSGSGTDFTLNIHPVEKVDAATYHCQQSTEDPWTFGGGTKLEIKGGGGSGGGGSGGGGSQVQLQQSGAELVRPGSSVKISCKASGYAFSSYWMNWVKQRPGQGLEWIGQIWPGDGDTNYNGKFKGKATLTADESSSTAYMQLSSLASEDSAVYFCARRETTTVGRYYYAMDYWGQGTTVTVSS

SEQ ID NO: 340 - DNA, 1497 bp, artificial sequence
  VH5VL2xCD19 HLLH
gacgtccaactggtgcagtcaggggctgaagtgaaaaaacctggggcctcagtgaaggtgtcctgcaaggcttctggctacacctttactaggtacacgatgcactgggtaaggcaggcacctggacagggtctggaatggattggatacattaatcctagccgtggttatactaattacgcagacagcgtcaagggccgcttcacaatcactacagacaaatccaccagcacagcctacatggaactgagcagcctgcgttctgaggacactgcaacctattactgtgcaagatattatgatgatcattactgccttgactactggggccaaggcaccacggtcaccgtctcctcaggcgaaggtactagtactggttctggtggaagtggaggttcaggtggagcagacgacattgtactgacccagtctccagcaactctgtctctgtctccaggggagcgtgccaccctgagctgcagagccagtcaaagtgtaagttacatgaactggtaccagcagaagccgggcaaggcacccaaaagatggatttatgacacatccaaagtggcttctggagtccctgctcgcttcagtggcagtgggtctgggaccgactactctctcacaatcaacagcttggaggctgaagatgctgccacttattactgccaacagtggagtagtaacccgctcacgttcggtggcgggaccaaggtggagatcaaatccggaggtggtggatccgatatccagctgacccagtctccagcttctttggctgtgtctctagggcagagggccaccatctcctgcaaggccagccaaagtgttgattatgatggtgatagttatttgaactggtaccaacagattccaggacagccacccaaactcctcatctatgatgcatccaatctagtttctgggatcccacccaggtttagtggcagtgggtctgggacagacttcaccctcaacatccatcctgtggagaaggtggatgctgcaacctatcactgtcagcaaagtactgaggatccgtggacgttcggtggagggaccaagctcgagatcaaaggtggtggtggttctggcggcggcggctccggtggtggtggttctcaggtgcagctgcagcagtctggggctgagctggtgaggcctgggtcctcagtgaagatttcctgcaaggcttctggctatgcattcagtagctactggatgaactgggtgaagcagaggcctggacagggtcttgagtggattggacagatttggcctggagatggtgatactaactacaatggaaagttcaagggtaaagccactctgactgcagacgaatcctccagcacagcctacatgcaactcagcagcctagcatctgaggactctgcggtctatttctgtgcaagacgggagactacgacggtaggccgttattactatgctatggactactggggccaagggaccacggtcaccgtctcctcc

SEQ ID NO: 341 - protein, 499 aa, artificial sequence
  VH5VL2xCD19 HLLH
DVQLVQSGAEVKKPGASVKVSCKASGYTFTRYTMHWVRQAPGQGLEWIGYINPSRGYTNYADSVKGRFTITTDKSTSTAYMELSSLRSEDTATYYCARYYDDHYCLDYWGQGTTVTVSSGEGTSTGSGGSGGSGGADDIVLTQSPATLSLSPGERATLSCRASQSVSYMNWYQQKPGKAPKRWIYDTSKVASGVPARFSGSGSGTDYSLTINSLEAEDAATYYCQQWSSNPLTFGGGTKVEIKSGGGGSDIQLTQSPASLAVSLGQRATISCKASQSVDYDGDSYLNWYQQIPGQPPKLLIYDASNLVSGIPPRFSGSGSGTDFTLNIHPVEKVDAATYHCQQSTEDPWTFGGGTKLEIKGGGGSGGGGSGGGGSQVQLQQSGAELVRPGSSVKISCKASGYAFSSYWMNWVKQRPGQGLEWIGQIWPGDGDTNYNGKFKGKATLTADESSSTAYMQLSSLASEDSAVYFCARRETTTVGRYYYAMDYWGQGTTVTVSS

SEQ ID NO: 342 - DNA, 1494 bp, artificial sequence
  VL3VH5xCD19 LHHL
gacattgtactgacccagtctccagcaactctgtctctgtctccaggggagcgtgccaccctgacctgcagagccagttcaagtgtaagttacatgaactggtaccagcagaagccgggcaaggcacccaaaagatggatttatgacacatccaaagtggcttctggagtccctgctcgcttcagtggcagtgggtctgggaccgactactctctcacaatcaacagcttggaggctgaagatgctgccacttattactgccaacagtggagtagtaacccgctcacgttcggtggcgggaccaaggtggagatcaaaggcgaaggtactagtactggttctggtggaagtggaggttcaggtggagcagacgacgtccaactggtgcagtcaggggctgaagtgaaaaaacctggggcctcagtgaaggtgtcctgcaaggcttctggctacacctttactaggtacacgatgcactgggtaaggcaggcacctggacagggtctggaatggattggatacattaatcctagccgtggttatactaattacgcagacagcgtcaagggccgcttcacaatcactacagacaaatccaccagcacagcctacatggaactgagcagcctgcgttctgaggacactgcaacctattactgtgcaagatattatgatgatcattactgccttgactactggggccaaggcaccacggtcaccgtctcctccggaggtggtggatcccaggtgcagctgcagcagtctggggctgagctggtgaggcctgggtcctcagtgaagatttcctgcaaggcttctggctatgcattcagtagctactggatgaactgggtgaagcagaggcctggacagggtcttgagtggattggacagatttggcctggagatggtgatactaactacaatggaaagttcaagggtaaagccactctgactgcagacgaatcctccagcacagcctacatgcaactcagcagcctagcatctgaggactctgcggtctatttctgtgcaagacgggagactacgacggtaggccgttattactatgctatggactactggggccaagggaccacggtcaccgtctcctccggtggtggtggttctggcggcggcggctccggtggtggtggttctgatatccagctgacccagtctccagcttctttggctgtgtctctagggcagagggccaccatctcctgcaaggccagccaaagtgttgattatgatggtgatagttatttgaactggtaccaacagattccaggacagccacccaaactcctcatctatgatgcatccaatctagtttctgggatcccacccaggtttagtggcagtgggtctgggacagacttcaccctcaacatccatcctgtggagaaggtggatgctgcaacctatcactgtcagcaaagtactgaggatccgtggacgttcggtggagggaccaagctcgagatcaaa

SEQ ID NO: 343 - protein, 498 aa, artificial sequence
  VL3VH5xCD19 LHHL
DIVLTQSPATLSLSPGERATLTCRASSSVSYMNWYQQKPGKAPKRWIYDTSKVASGVPARFSGSGSGTDYSLTINSLEAEDAATYYCQQWSSNPLTFGGGTKVEIKGEGTSTGSGGSGGSGGADDVQLVQSGAEVKKPGASVKVSCKASGYTFTRYTMHWVRQAPGQGLEWIGYINPSRGYTNYADSVKGRFTITTDKSTSTAYMELSSLRSEDTATYYCARYYDDHYCLDYWGQGTTVTVSSGGGGSQVQLQQSGAELVRPGSSVKISCKASGYAFSSYWMNWVKQRPGQGLEWIGQIWPGDGDTNYNGKFKGKATLTADESSSTAYMQLSSLASEDSAVYFCARRETTTVGRYYYAMDYWGQGTTVTVSSGGGGSGGGGSGGGGSDIQLTQSPASLAVSLGQRATISCKASQSVDYDGDSYLNWYQQIPGQPPKLLIYDASNLVSGIPPRFSGSGSGTDFTLNIHPVEKVDAATYHCQQSTEDPWTFGGGTKLEIK

SEQ ID NO: 344 - DNA, 1497 bp, artificial sequence
  VH5VL3xCD19 HLHL
gacgtccaactggtgcagtcaggggctgaagtgaaaaaacctggggcctcagtgaaggtgtcctgcaaggcttctggctacacctttactaggtacacgatgcactgggtaaggcaggcacctggacagggtctggaatggattggatacattaatcctagccgtggttatactaattacgcagacagcgtcaagggccgcttcacaatcactacagacaaatccaccagcacagcctacatggaactgagcagcctgcgttctgaggacactgcaacctattactgtgcaagatattatgatgatcattactgccttgactactggggccaaggcaccacggtcaccgtctcctcaggcgaaggtactagtactggttctggtggaagtggaggttcaggtggagcagacgacattgtactgacccagtctccagcaactctgtctctgtctccaggggagcgtgccaccctgacctgcagagccagttcaagtgtaagttacatgaactggtaccagcagaagccgggcaaggcacccaaaagatggatttatgacacatccaaagtggcttctggagtccctgctcgcttcagtggcagtgggtctgggaccgactactctctcacaatcaacagcttggaggctgaagatgctgccacttattactgccaacagtggagtagtaacccgctcacgttcggtggcgggaccaaggtggagatcaaatccggaggtggtggatcccaggtgcagctgcagcagtctggggctgagctggtgaggcctgggtcctcagtgaagatttcctgcaaggcttctggctatgcattcagtagctactggatgaactgggtgaagcagaggcctggacagggtcttgagtggattggacagatttggcctggagatggtgatactaactacaatggaaagttcaagggtaaagccactctgactgcagacgaatcctccagcacagcctacatgcaactcagcagcctagcatctgaggactctgcggtctatttctgtgcaagacgggagactacgacggtaggccgttattactatgctatggactactggggccaagggaccacggtcaccgtctcctccggtggtggtggttctggcggcggcggctccggtggtggtggttctgatatccagctgacccagtctccagcttctttggctgtgtctctagggcagagggccaccatctcctgcaaggccagccaaagtgttgattatgatggtgatagttatttgaactggtaccaacagattccaggacagccacccaaactcctcatctatgatgcatccaatctagtttctgggatcccacccaggtttagtggcagtgggtctgggacagacttcaccctcaacatccatcctgtggagaaggtggatgctgcaacctatcactgtcagcaaagtactgaggatccgtggacgttcggtggagggaccaagctcgagatcaaa

SEQ ID NO: 345 - protein, 499 aa, artificial sequence
  VH5VL3xCD19 HLHL
DVQLVQSGAEVKKPGASVKVSCKASGYTFTRYTMHWVRQAPGQGLEWIGYINPSRGYTNYADSVKGRFTITTDKSTSTAYMELSSLRSEDTATYYCARYYDDHYCLDYWGQGTTVTVSSGEGTSTGSGGSGGSGGADDIVLTQSPATLSLSPGERATLTCRASSSVSYMNWYQQKPGKAPKRWIYDTSKVASGVPARFSGSGSGTDYSLTINSLEAEDAATYYCQQWSSNPLTFGGGTKVEIKSGGGGSQVQLQQSGAELVRPGSSVKISCKASGYAFSSYWMNWVKQRPGQGLEWIGQIWPGDGDTNYNGKFKGKATLTADESSSTAYMQLSSLASEDSAVYFCARRETTTVGRYYYAMDYWGQGTTVTVSSGGGGSGGGGSGGGGSDIQLTQSPASLAVSLGQRATISCKASQSVDYDGDSYLNWYQQIPGQPPKLLIYDASNLVSGIPPRFSGSGSGTDFTLNIHPVEKVDAATYHCQQSTEDPWTFGGGTKLEIK

SEQ ID NO: 346 - DNA, 1494 bp, artificial sequence
  VL3VH5xCD19 LHLH
gacattgtactgacccagtctccagcaactctgtctctgtctccaggggagcgtgccaccctgacctgcagagccagttcaagtgtaagttacatgaactggtaccagcagaagccgggcaaggcacccaaaagatggatttatgacacatccaaagtggcttctggagtccctgctcgcttcagtggcagtgggtctgggaccgactactctctcacaatcaacagcttggaggctgaagatgctgccacttattactgccaacagtggagtagtaacccgctcacgttcggtggcgggaccaaggtggagatcaaaggcgaaggtactagtactggttctggtggaagtggaggttcaggtggagcagacgacgtccaactggtgcagtcaggggctgaagtgaaaaaacctggggcctcagtgaaggtgtcctgcaaggcttctggctacacctttactaggtacacgatgcactgggtaaggcaggcacctggacagggtctggaatggattggatacattaatcctagccgtggttatactaattacgcagacagcgtcaagggccgcttcacaatcactacagacaaatccaccagcacagcctacatggaactgagcagcctgcgttctgaggacactgcaacctattactgtgcaagatattatgatgatcattactgccttgactactggggccaaggcaccacggtcaccgtctcctccggaggtggtggatccgatatccagctgacccagtctccagcttctttggctgtgtctctagggcagagggccaccatctcctgcaaggccagccaaagtgttgattatgatggtgatagttatttgaactggtaccaacagattccaggacagccacccaaactcctcatctatgatgcatccaatctagtttctgggatcccacccaggtttagtggcagtgggtctgggacagacttcaccctcaacatccatcctgtggagaaggtggatgctgcaacctatcactgtcagcaaagtactgaggatccgtggacgttcggtggagggaccaagctcgagatcaaaggtggtggtggttctggcggcggcggctccggtggtggtggttctcaggtgcagctgcagcagtctggggctgagctggtgaggcctgggtcctcagtgaagatttcctgcaaggcttctggctatgcattcagtagctactggatgaactgggtgaagcagaggcctggacagggtcttgagtggattggacagatttggcctggagatggtgatactaactacaatggaaagttcaagggtaaagccactctgactgcagacgaatcctccagcacagcctacatgcaactcagcagcctagcatctgaggactctgcggtctatttctgtgcaagacgggagactacgacggtaggccgttattactatgctatggactactggggccaagggaccacggtcaccgtctcctcc

SEQ ID NO: 347 - protein, 498 aa, artificial sequence
  VL3VH5xCD19 LHLH
DIVLTQSPATLSLSPGERATLTCRASSSVSYMNWYQQKPGKAPKRWIYDTSKVASGVPARFSGSGSGTDYSLTINSLEAEDAATYYCQQWSSNPLTFGGGTKVEIKGEGTSTGSGGSGGSGGADDVQLVQSGAEVKKPGASVKVSCKASGYTFTRYTMHWVRQAPGQGLEWIGYINPSRGYTNYADSVKGRFTITTDKSTSTAYMELSSLRSEDTATYYCARYYDDHYCLDYWGQGTTVTVSSGGGGSDIQLTQSPASLAVSLGQRATISCKASQSVDYDGDSYLNWYQQIPGQPPKLLIYDASNLVSGIPPRFSGSGSGTDFTLNIHPVEKVDAATYHCQQSTEDPWTFGGGTKLEIKGGGGSGGGGSGGGGSQVQLQQSGAELVRPGSSVKISCKASGYAFSSYWMNWVKQRPGQGLEWIGQIWPGDGDTNYNGKFKGKATLTADESSSTAYMQLSSLASEDSAVYFCARRETTTVGRYYYAMDYWGQGTTVTVSS

SEQ ID NO: 348 - DNA, 1497 bp, artificial sequence
  VH5VL3xCD19 HLLH
gacgtccaactggtgcagtcaggggctgaagtgaaaaaacctggggcctcagtgaaggtgtcctgcaaggcttctggctacacctttactaggtacacgatgcactgggtaaggcaggcacctggacagggtctggaatggattggatacattaatcctagccgtggttatactaattacgcagacagcgtcaagggccgcttcacaatcactacagacaaatccaccagcacagcctacatggaactgagcagcctgcgttctgaggacactgcaacctattactgtgcaagatattatgatgatcattactgccttgactactggggccaaggcaccacggtcaccgtctcctcaggcgaaggtactagtactggttctggtggaagtggaggttcaggtggagcagacgacattgtactgacccagtctccagcaactctgtctctgtctccaggggagcgtgccaccctgacctgcagagccagttcaagtgtaagttacatgaactggtaccagcagaagccgggcaaggcacccaaaagatggatttatgacacatccaaagtggcttctggagtccctgctcgcttcagtggcagtgggtctgggaccgactactctctcacaatcaacagcttggaggctgaagatgctgccacttattactgccaacagtggagtagtaacccgctcacgttcggtggcgggaccaaggtggagatcaaatccggaggtggtggatccgatatccagctgacccagtctccagcttctttggctgtgtctctagggcagagggccaccatctcctgcaaggccagccaaagtgttgattatgatggtgatagttatttgaactggtaccaacagattccaggacagccacccaaactcctcatctatgatgcatccaatctagtttctgggatcccacccaggtttagtggcagtgggtctgggacagacttcaccctcaacatccatcctgtggagaaggtggatgctgcaacctatcactgtcagcaaagtactgaggatccgtggacgttcggtggagggaccaagctcgagatcaaaggtggtggtggttctggcggcggcggctccggtggtggtggttctcaggtgcagctgcagcagtctggggctgagctggtgaggcctgggtcctcagtgaagatttcctgcaaggcttctggctatgcattcagtagctactggatgaactgggtgaagcagaggcctggacagggtcttgagtggattggacagatttggcctggagatggtgatactaactacaatggaaagttcaagggtaaagccactctgactgcagacgaatcctccagcacagcctacatgcaactcagcagcctagcatctgaggactctgcggtctatttctgtgcaagacgggagactacgacggtaggccgttattactatgctatggactactggggccaagggaccacggtcaccgtctcctcc

SEQ ID NO: 349 - protein, 499 aa, artificial sequence
  VH5VL3xCD19 HLLH
DVQLVQSGAEVKKPGASVKVSCKASGYTFTRYTMHWVRQAPGQGLEWIGYINPSRGYTNYADSVKGRFTITTDKSTSTAYMELSSLRSEDTATYYCARYYDDHYCLDYWGQGTTVTVSSGEGTSTGSGGSGGSGGADDIVLTQSPATLSLSPGERATLTCRASSSVSYMNWYQQKPGKAPKRWIYDTSKVASGVPARFSGSGSGTDYSLTINSLEAEDAATYYCQQWSSNPLTFGGGTKVEIKSGGGGSDIQLTQSPASLAVSLGQRATISCKASQSVDYDGDSYLNWYQQIPGQPPKLLIYDASNLVSGIPPRFSGSGSGTDFTLNIHPVEKVDAATYHCQQSTEDPWTFGGGTKLEIKGGGGSGGGGSGGGGSQVQLQQSGAELVRPGSSVKISCKASGYAFSSYWMNWVKQRPGQGLEWIGQIWPGDGDTNYNGKFKGKATLTADESSSTAYMQLSSLASEDSAVYFCARRETTTVGRYYYAMDYWGQGTTVTVSS

SEQ ID NO: 350 - DNA, 1494 bp, artificial sequence
  VL1VH7xCD19 LHHL
gacattcagatgacccagtctccatctagcctgtctgcatctgtcggggaccgtgtcaccatcacctgcagagccagtcaaagtgtaagttacatgaactggtaccagcagaagccgggcaaggcacccaaaagatggatttatgacacatccaaagtggcttctggagtccctgctcgcttcagtggcagtgggtctgggaccgactactctctcacaatcaacagcttggaggctgaagatgctgccacttattactgccaacagtggagtagtaacccgctcacgttcggtggcgggaccaaggtggagatcaaaggcgaaggtactagtactggttctggtggaagtggaggttcaggtggagcagacgacgtccaactggtgcagtcaggggctgaagtgaaaaaacctggggcctcagtgaaggtgtcctgcaaggcttctggctacacctttactaggtacacgatgcactgggtaaggcaggcacctggacagggtctggaatggattggatacattaatcctagccgtggttatactaattacaatcagaagttcaaggaccgcgtcacaatcactacagacaaatccaccagcacagcctacatggaactgagcagcctgcgttctgaggacactgcagtctattactgtgcaagatattatgatgatcattactgccttgactactggggccaaggcaccacggtcaccgtctcctccggaggtggtggatcccaggtgcagctgcagcagtctggggctgagctggtgaggcctgggtcctcagtgaagatttcctgcaaggcttctggctatgcattcagtagctactggatgaactgggtgaagcagaggcctggacagggtcttgagtggattggacagatttggcctggagatggtgatactaactacaatggaaagttcaagggtaaagccactctgactgcagacgaatcctccagcacagcctacatgcaactcagcagcctagcatctgaggactctgcggtctatttctgtgcaagacgggagactacgacggtaggccgttattactatgctatggactactggggccaagggaccacggtcaccgtctcctccggtggtggtggttctggcggcggcggctccggtggtggtggttctgatatccagctgacccagtctccagcttctttggctgtgtctctagggcagagggccaccatctcctgcaaggccagccaaagtgttgattatgatggtgatagttatttgaactggtaccaacagattccaggacagccacccaaactcctcatctatgatgcatccaatctagtttctgggatcccacccaggtttagtggcagtgggtctgggacagacttcaccctcaacatccatcctgtggagaaggtggatgctgcaacctatcactgtcagcaaagtactgaggatccgtggacgttcggtggagggaccaagctcgagatcaaa

SEQ ID NO: 351 - protein, 498 aa, artificial sequence
  VL1VH7xCD19 LHHL
DIQMTQSPSSLSASVGDRVTITCRASQSVSYMNWYQQKPGKAPKRWIYDTSKVASGVPARFSGSGSGTDYSLTINSLEAEDAATYYCQQWSSNPLTFGGGTKVEIKGEGTSTGSGGSGGSGGADDVQLVQSGAEVKKPGASVKVSCKASGYTFTRYTMHWVRQAPGQGLEWIGYINPSRGYTNYNQKFKDRVTITTDKSTSTAYMELSSLRSEDTAVYYCARYYDDHYCLDYWGQGTTVTVSSGGGGSQVQLQQSGAELVRPGSSVKISCKASGYAFSSYWMNWVKQRPGQGLEWIGQIWPGDGDTNYNGKFKGKATLTADESSSTAYMQLSSLASEDSAVYFCARRETTTVGRYYYAMDYWGQGTTVTVSSGGGGSGGGGSGGGGSDIQLTQSPASLAVSLGQRATISCKASQSVDYDGDSYLNWYQQIPGQPPKLLIYDASNLVSGIPPRFSGSGSGTDFTLNIHPVEKVDAATYHCQQSTEDPWTFGGGTKLEIK

SEQ ID NO: 352 - DNA, 1497 bp, artificial sequence
  VH7VL1xCD19 HLHL
gacgtccaactggtgcagtcaggggctgaagtgaaaaaacctggggcctcagtgaaggtgtcctgcaaggcttctggctacacctttactaggtacacgatgcactgggtaaggcaggcacctggacagggtctggaatggattggatacattaatcctagccgtggttatactaattacaatcagaagttcaaggaccgcgtcacaatcactacagacaaatccaccagcacagcctacatggaactgagcagcctgcgttctgaggacactgcagtctattactgtgcaagatattatgatgatcattactgccttgactactggggccaaggcaccacggtcaccgtctcctcaggcgaaggtactagtactggttctggtggaagtggaggttcaggtggagcagacgacattcagatgacccagtctccatctagcctgtctgcatctgtcggggaccgtgtcaccatcacctgcagagccagtcaaagtgtaagttacatgaactggtaccagcagaagccgggcaaggcacccaaaagatggatttatgacacatccaaagtggcttctggagtccctgctcgcttcagtggcagtgggtctgggaccgactactctctcacaatcaacagcttggaggctgaagatgctgccacttattactgccaacagtggagtagtaacccgctcacgttcggtggcgggaccaaggtggagatcaaatccggaggtggtggatcccaggtgcagctgcagcagtctggggctgagctggtgaggcctgggtcctcagtgaagatttcctgcaaggcttctggctatgcattcagtagctactggatgaactgggtgaagcagaggcctggacagggtcttgagtggattggacagatttggcctggagatggtgatactaactacaatggaaagttcaagggtaaagccactctgactgcagacgaatcctccagcacagcctacatgcaactcagcagcctagcatctgaggactctgcggtctatttctgtgcaagacgggagactacgacggtaggccgttattactatgctatggactactggggccaagggaccacggtcaccgtctcctccggtggtggtggttctggcggcggcggctccggtggtggtggttctgatatccagctgacccagtctccagcttctttggctgtgtctctagggcagagggccaccatctcctgcaaggccagccaaagtgttgattatgatggtgatagttatttgaactggtaccaacagattccaggacagccacccaaactcctcatctatgatgcatccaatctagtttctgggatcccacccaggtttagtggcagtgggtctgggacagacttcaccctcaacatccatcctgtggagaaggtggatgctgcaacctatcactgtcagcaaagtactgaggatccgtggacgttcggtggagggaccaagctcgagatcaaa

SEQ ID NO: 353 - protein, 499 aa, artificial sequence
  VH7VL1xCD19 HLHL
DVQLVQSGAEVKKPGASVKVSCKASGYTFTRYTMHWVRQAPGQGLEWIGYINPSRGYTNYNQKFKDRVTITTDKSTSTAYMELSSLRSEDTAVYYCARYYDDHYCLDYWGQGTTVTVSSGEGTSTGSGGSGGSGGADDIQMTQSPSSLSASVGDRVTITCRASQSVSYMNWYQQKPGKAPKRWIYDTSKVASGVPARFSGSGSGTDYSLTINSLEAEDAATYYCQQWSSNPLTFGGGTKVEIKSGGGGSQVQLQQSGAELVRPGSSVKISCKASGYAFSSYWMNWVKQRPGQGLEWIGQIWPGDGDTNYNGKFKGKATLTADESSSTAYMQLSSLASEDSAVYFCARRETTTVGRYYYAMDYWGQGTTVTVSSGGGGSGGGGSGGGGSDIQLTQSPASLAVSLGQRATISCKASQSVDYDGDSYLNWYQQIPGQPPKLLIYDASNLVSGIPPRFSGSGSGTDFTLNIHPVEKVDAATYHCQQSTEDPWTFGGGTKLEIK

SEQ ID NO: 354 - DNA, 1494 bp, artificial sequence
  VL1VH7xCD19 LHLH
gacattcagatgacccagtctccatctagcctgtctgcatctgtcggggaccgtgtcaccatcacctgcagagccagtcaaagtgtaagttacatgaactggtaccagcagaagccgggcaaggcacccaaaagatggatttatgacacatccaaagtggcttctggagtccctgctcgcttcagtggcagtgggtctgggaccgactactctctcacaatcaacagcttggaggctgaagatgctgccacttattactgccaacagtggagtagtaacccgctcacgttcggtggcgggaccaaggtggagatcaaaggcgaaggtactagtactggttctggtggaagtggaggttcaggtggagcagacgacgtccaactggtgcagtcaggggctgaagtgaaaaaacctggggcctcagtgaaggtgtcctgcaaggcttctggctacacctttactaggtacacgatgcactgggtaaggcaggcacctggacagggtctggaatggattggatacattaatcctagccgtggttatactaattacaatcagaagttcaaggaccgcgtcacaatcactacagacaaatccaccagcacagcctacatggaactgagcagcctgcgttctgaggacactgcagtctattactgtgcaagatattatgatgatcattactgccttgactactggggccaaggcaccacggtcaccgtctcctccggaggtggtggatccgatatccagctgacccagtctccagcttctttggctgtgtctctagggcagagggccaccatctcctgcaaggccagccaaagtgttgattatgatggtgatagttatttgaactggtaccaacagattccaggacagccacccaaactcctcatctatgatgcatccaatctagtttctgggatcccacccaggtttagtggcagtgggtctgggacagacttcaccctcaacatccatcctgtggagaaggtggatgctgcaacctatcactgtcagcaaagtactgaggatccgtggacgttcggtggagggaccaagctcgagatcaaaggtggtggtggttctggcggcggcggctccggtggtggtggttctcaggtgcagctgcagcagtctggggctgagctggtgaggcctgggtcctcagtgaagatttcctgcaaggcttctggctatgcattcagtagctactggatgaactgggtgaagcagaggcctggacagggtcttgagtggattggacagatttggcctggagatggtgatactaactacaatggaaagttcaagggtaaagccactctgactgcagacgaatcctccagcacagcctacatgcaactcagcagcctagcatctgaggactctgcggtctatttctgtgcaagacgggagactacgacggtaggccgttattactatgctatggactactggggccaagggaccacggtcaccgtctcctcc

SEQ ID NO: 355 - protein, 498 aa, artificial sequence
  VL1VH7xCD19 LHLH
DIQMTQSPSSLSASVGDRVTITCRASQSVSYMNWYQQKPGKAPKRWIYDTSKVASGVPARFSGSGSGTDYSLTINSLEAEDAATYYCQQWSSNPLTFGGGTKVEIKGEGTSTGSGGSGGSGGADDVQLVQSGAEVKKPGASVKVSCKASGYTFTRYTMHWVRQAPGQGLEWIGYINPSRGYTNYNQKFKDRVTITTDKSTSTAYMELSSLRSEDTAVYYCARYYDDHYCLDYWGQGTTVTVSSGGGGSDIQLTQSPASLAVSLGQRATISCKASQSVDYDGDSYLNWYQQIPGQPPKLLIYDASNLVSGIPPRFSGSGSGTDFTLNIHPVEKVDAATYHCQQSTEDPWTFGGGTKLEIKGGGGSGGGGSGGGGSQVQLQQSGAELVRPGSSVKISCKASGYAFSSYWMNWVKQRPGQGLEWIGQIWPGDGDTNYNGKFKGKATLTADESSSTAYMQLSSLASEDSAVYFCARRETTTVGRYYYAMDYWGQGTTVTVSS

SEQ ID NO: 356 - DNA, 1497 bp, artificial sequence
  VH7VL1xCD19 HLLH
gacgtccaactggtgcagtcaggggctgaagtgaaaaaacctggggcctcagtgaaggtgtcctgcaaggcttctggctacacctttactaggtacacgatgcactgggtaaggcaggcacctggacagggtctggaatggattggatacattaatcctagccgtggttatactaattacaatcagaagttcaaggaccgcgtcacaatcactacagacaaatccaccagcacagcctacatggaactgagcagcctgcgttctgaggacactgcagtctattactgtgcaagatattatgatgatcattactgccttgactactggggccaaggcaccacggtcaccgtctcctcaggcgaaggtactagtactggttctggtggaagtggaggttcaggtggagcagacgacattcagatgacccagtctccatctagcctgtctgcatctgtcggggaccgtgtcaccatcacctgcagagccagtcaaagtgtaagttacatgaactggtaccagcagaagccgggcaaggcacccaaaagatggatttatgacacatccaaagtggcttctggagtccctgctcgcttcagtggcagtgggtctgggaccgactactctctcacaatcaacagcttggaggctgaagatgctgccacttattactgccaacagtggagtagtaacccgctcacgttcggtggcgggaccaaggtggagatcaaatccggaggtggtggatccgatatccagctgacccagtctccagcttctttggctgtgtctctagggcagagggccaccatctcctgcaaggccagccaaagtgttgattatgatggtgatagttatttgaactggtaccaacagattccaggacagccacccaaactcctcatctatgatgcatccaatctagtttctgggatcccacccaggtttagtggcagtgggtctgggacagacttcaccctcaacatccatcctgtggagaaggtggatgctgcaacctatcactgtcagcaaagtactgaggatccgtggacgttcggtggagggaccaagctcgagatcaaaggtggtggtggttctggcggcggcggctccggtggtggtggttctcaggtgcagctgcagcagtctggggctgagctggtgaggcctgggtcctcagtgaagatttcctgcaaggcttctggctatgcattcagtagctactggatgaactgggtgaagcagaggcctggacagggtcttgagtggattggacagatttggcctggagatggtgatactaactacaatggaaagttcaagggtaaagccactctgactgcagacgaatcctccagcacagcctacatgcaactcagcagcctagcatctgaggactctgcggtctatttctgtgcaagacgggagactacgacggtaggccgttattactatgctatggactactggggccaagggaccacggtcaccgtctcctcc

SEQ ID NO: 357 - protein, 499 aa, artificial sequence
  VH7VL1xCD19 HLLH
DVQLVQSGAEVKKPGASVKVSCKASGYTFTRYTMHWVRQAPGQGLEWIGYINPSRGYTNYNQKFKDRVTITTDKSTSTAYMELSSLRSEDTAVYYCARYYDDHYCLDYWGQGTTVTVSSGEGTSTGSGGSGGSGGADDIQMTQSPSSLSASVGDRVTITCRASQSVSYMNWYQQKPGKAPKRWIYDTSKVASGVPARFSGSGSGTDYSLTINSLEAEDAATYYCQQWSSNPLTFGGGTKVEIKSGGGGSDIQLTQSPASLAVSLGQRATISCKASQSVDYDGDSYLNWYQQIPGQPPKLLIYDASNLVSGIPPRFSGSGSGTDFTLNIHPVEKVDAATYHCQQSTEDPWTFGGGTKLEIKGGGGSGGGGSGGGGSQVQLQQSGAELVRPGSSVKISCKASGYAFSSYWMNWVKQRPGQGLEWIGQIWPGDGDTNYNGKFKGKATLTADESSSTAYMQLSSLASEDSAVYFCARRETTTVGRYYYAMDYWGQGTTVTVSS

SEQ ID NO: 358 - DNA, 1494 bp, artificial sequence
  VL2VH7xCD19 LHHL
gacattgtactgacccagtctccagcaactctgtctctgtctccaggggagcgtgccaccctgagctgcagagccagtcaaagtgtaagttacatgaactggtaccagcagaagccgggcaaggcacccaaaagatggatttatgacacatccaaagtggcttctggagtccctgctcgcttcagtggcagtgggtctgggaccgactactctctcacaatcaacagcttggaggctgaagatgctgccacttattactgccaacagtggagtagtaacccgctcacgttcggtggcgggaccaaggtggagatcaaaggcgaaggtactagtactggttctggtggaagtggaggttcaggtggagcagacgacgtccaactggtgcagtcaggggctgaagtgaaaaaacctggggcctcagtgaaggtgtcctgcaaggcttctggctacacctttactaggtacacgatgcactgggtaaggcaggcacctggacagggtctggaatggattggatacattaatcctagccgtggttatactaattacaatcagaagttcaaggaccgcgtcacaatcactacagacaaatccaccagcacagcctacatggaactgagcagcctgcgttctgaggacactgcagtctattactgtgcaagatattatgatgatcattactgccttgactactggggccaaggcaccacggtcaccgtctcctccggaggtggtggatcccaggtgcagctgcagcagtctggggctgagctggtgaggcctgggtcctcagtgaagatttcctgcaaggcttctggctatgcattcagtagctactggatgaactgggtgaagcagaggcctggacagggtcttgagtggattggacagatttggcctggagatggtgatactaactacaatggaaagttcaagggtaaagccactctgactgcagacgaatcctccagcacagcctacatgcaactcagcagcctagcatctgaggactctgcggtctatttctgtgcaagacgggagactacgacggtaggccgttattactatgctatggactactggggccaagggaccacggtcaccgtctcctccggtggtggtggttctggcggcggcggctccggtggtggtggttctgatatccagctgacccagtctccagcttctttggctgtgtctctagggcagagggccaccatctcctgcaaggccagccaaagtgttgattatgatggtgatagttatttgaactggtaccaacagattccaggacagccacccaaactcctcatctatgatgcatccaatctagtttctgggatcccacccaggtttagtggcagtgggtctgggacagacttcaccctcaacatccatcctgtggagaaggtggatgctgcaacctatcactgtcagcaaagtactgaggatccgtggacgttcggtggagggaccaagctcgagatcaaa

SEQ ID NO: 359 - protein, 498 aa, artificial sequence
  VL2VH7xCD19 LHHL
DIVLTQSPATLSLSPGERATLSCRASQSVSYMNWYQQKPGKAPKRWIYDTSKVASGVPARFSGSGSGTDYSLTINSLEAEDAATYYCQQWSSNPLTFGGGTKVEIKGEGTSTGSGGSGGSGGADDVQLVQSGAEVKKPGASVKVSCKASGYTFTRYTMHWVRQAPGQGLEWIGYINPSRGYTNYNQKFKDRVTITTDKSTSTAYMELSSLRSEDTAVYYCARYYDDHYCLDYWGQGTTVTVSSGGGGSQVQLQQSGAELVRPGSSVKISCKASGYAFSSYWMNWVKQRPGQGLEWIGQIWPGDGDTNYNGKFKGKATLTADESSSTAYMQLSSLASEDSAVYFCARRETTTVGRYYYAMDYWGQGTTVTVSSGGGGSGGGGSGGGGSDIQLTQSPASLAVSLGQRATISCKASQSVDYDGDSYLNWYQQIPGQPPKLLIYDASNLVSGIPPRFSGSGSGTDFTLNIHPVEKVDAATYHCQQSTEDPWTFGGGTKLEIK

SEQ ID NO: 360 - DNA, 1497 bp, artificial sequence
  VH7VL2xCD19 HLHL
gacgtccaactggtgcagtcaggggctgaagtgaaaaaacctggggcctcagtgaaggtgtcctgcaaggcttctggctacacctttactaggtacacgatgcactgggtaaggcaggcacctggacagggtctggaatggattggatacattaatcctagccgtggttatactaattacaatcagaagttcaaggaccgcgtcacaatcactacagacaaatccaccagcacagcctacatggaactgagcagcctgcgttctgaggacactgcagtctattactgtgcaagatattatgatgatcattactgccttgactactggggccaaggcaccacggtcaccgtctcctcaggcgaaggtactagtactggttctggtggaagtggaggttcaggtggagcagacgacattgtactgacccagtctccagcaactctgtctctgtctccaggggagcgtgccaccctgagctgcagagccagtcaaagtgtaagttacatgaactggtaccagcagaagccgggcaaggcacccaaaagatggatttatgacacatccaaagtggcttctggagtccctgctcgcttcagtggcagtgggtctgggaccgactactctctcacaatcaacagcttggaggctgaagatgctgccacttattactgccaacagtggagtagtaacccgctcacgttcggtggcgggaccaaggtggagatcaaatccggaggtggtggatcccaggtgcagctgcagcagtctggggctgagctggtgaggcctgggtcctcagtgaagatttcctgcaaggcttctggctatgcattcagtagctactggatgaactgggtgaagcagaggcctggacagggtcttgagtggattggacagatttggcctggagatggtgatactaactacaatggaaagttcaagggtaaagccactctgactgcagacgaatcctccagcacagcctacatgcaactcagcagcctagcatctgaggactctgcggtctatttctgtgcaagacgggagactacgacggtaggccgttattactatgctatggactactggggccaagggaccacggtcaccgtctcctccggtggtggtggttctggcggcggcggctccggtggtggtggttctgatatccagctgacccagtctccagcttctttggctgtgtctctagggcagagggccaccatctcctgcaaggccagccaaagtgttgattatgatggtgatagttatttgaactggtaccaacagattccaggacagccacccaaactcctcatctatgatgcatccaatctagtttctgggatcccacccaggtttagtggcagtgggtctgggacagacttcaccctcaacatccatcctgtggagaaggtggatgctgcaacctatcactgtcagcaaagtactgaggatccgtggacgttcggtggagggaccaagctcgagatcaaa

SEQ ID NO: 361 - protein, 499 aa, artificial sequence
  VH7VL2xCD19 HLHL
DVQLVQSGAEVKKPGASVKVSCKASGYTFTRYTMHWVRQAPGQGLEWIGYINPSRGYTNYNQKFKDRVTITTDKSTSTAYMELSSLRSEDTAVYYCARYYDDHYCLDYWGQGTTVTVSSGEGTSTGSGGSGGSGGADDIVLTQSPATLSLSPGERATLSCRASQSVSYMNWYQQKPGKAPKRWIYDTSKVASGVPARFSGSGSGTDYSLTINSLEAEDAATYYCQQWSSNPLTFGGGTKVEIKSGGGGSQVQLQQSGAELVRPGSSVKISCKASGYAFSSYWMNWVKQRPGQGLEWIGQIWPGDGDTNYNGKFKGKATLTADESSSTAYMQLSSLASEDSAVYFCARRETTTVGRYYYAMDYWGQGTTVTVSSGGGGSGGGGSGGGGSDIQLTQSPASLAVSLGQRATISCKASQSVDYDGDSYLNWYQQIPGQPPKLLIYDASNLVSGIPPRFSGSGSGTDFTLNIHPVEKVDAATYHCQQSTEDPWTFGGGTKLEIK

SEQ ID NO: 362 - DNA, 1494 bp, artificial sequence
  VL2VH7xCD19 LHLH
gacattgtactgacccagtctccagcaactctgtctctgtctccaggggagcgtgccaccctgagctgcagagccagtcaaagtgtaagttacatgaactggtaccagcagaagccgggcaaggcacccaaaagatggatttatgacacatccaaagtggcttctggagtccctgctcgcttcagtggcagtgggtctgggaccgactactctctcacaatcaacagcttggaggctgaagatgctgccacttattactgccaacagtggagtagtaacccgctcacgttcggtggcgggaccaaggtggagatcaaaggcgaaggtactagtactggttctggtggaagtggaggttcaggtggagcagacgacgtccaactggtgcagtcaggggctgaagtgaaaaaacctggggcctcagtgaaggtgtcctgcaaggcttctggctacacctttactaggtacacgatgcactgggtaaggcaggcacctggacagggtctggaatggattggatacattaatcctagccgtggttatactaattacaatcagaagttcaaggaccgcgtcacaatcactacagacaaatccaccagcacagcctacatggaactgagcagcctgcgttctgaggacactgcagtctattactgtgcaagatattatgatgatcattactgccttgactactggggccaaggcaccacggtcaccgtctcctccggaggtggtggatccgatatccagctgacccagtctccagcttctttggctgtgtctctagggcagagggccaccatctcctgcaaggccagccaaagtgttgattatgatggtgatagttatttgaactggtaccaacagattccaggacagccacccaaactcctcatctatgatgcatccaatctagtttctgggatcccacccaggtttagtggcagtgggtctgggacagacttcaccctcaacatccatcctgtggagaaggtggatgctgcaacctatcactgtcagcaaagtactgaggatccgtggacgttcggtggagggaccaagctcgagatcaaaggtggtggtggttctggcggcggcggctccggtggtggtggttctcaggtgcagctgcagcagtctggggctgagctggtgaggcctgggtcctcagtgaagatttcctgcaaggcttctggctatgcattcagtagctactggatgaactgggtgaagcagaggcctggacagggtcttgagtggattggacagatttggcctggagatggtgatactaactacaatggaaagttcaagggtaaagccactctgactgcagacgaatcctccagcacagcctacatgcaactcagcagcctagcatctgaggactctgcggtctatttctgtgcaagacgggagactacgacggtaggccgttattactatgctatggactactggggccaagggaccacggtcaccgtctcctcc

SEQ ID NO: 363 - protein, 498 aa, artificial sequence
  VL2VH7xCD19 LHLH
DIVLTQSPATLSLSPGERATLSCRASQSVSYMNWYQQKPGKAPKRWIYDTSKVASGVPARFSGSGSGTDYSLTINSLEAEDAATYYCQQWSSNPLTFGGGTKVEIKGEGTSTGSGGSGGSGGADDVQLVQSGAEVKKPGASVKVSCKASGYTFTRYTMHWVRQAPGQGLEWIGYINPSRGYTNYNQKFKDRVTITTDKSTSTAYMELSSLRSEDTAVYYCARYYDDHYCLDYWGQGTTVTVSSGGGGSDIQLTQSPASLAVSLGQRATISCKASQSVDYDGDSYLNWYQQIPGQPPKLLIYDASNLVSGIPPRFSGSGSGTDFTLNIHPVEKVDAATYHCQQSTEDPWTFGGGTKLEIKGGGGSGGGGSGGGGSQVQLQQSGAELVRPGSSVKISCKASGYAFSSYWMNWVKQRPGQGLEWIGQIWPGDGDTNYNGKFKGKATLTADESSSTAYMQLSSLASEDSAVYFCARRETTTVGRYYYAMDYWGQGTTVTVSS

SEQ ID NO: 364 - DNA, 1497 bp, artificial sequence
  VH7VL2xCD19 HLLH
gacgtccaactggtgcagtcaggggctgaagtgaaaaaacctggggcctcagtgaaggtgtcctgcaaggcttctggctacacctttactaggtacacgatgcactgggtaaggcaggcacctggacagggtctggaatggattggatacattaatcctagccgtggttatactaattacaatcagaagttcaaggaccgcgtcacaatcactacagacaaatccaccagcacagcctacatggaactgagcagcctgcgttctgaggacactgcagtctattactgtgcaagatattatgatgatcattactgccttgactactggggccaaggcaccacggtcaccgtctcctcaggcgaaggtactagtactggttctggtggaagtggaggttcaggtggagcagacgacattgtactgacccagtctccagcaactctgtctctgtctccaggggagcgtgccaccctgagctgcagagccagtcaaagtgtaagttacatgaactggtaccagcagaagccgggcaaggcacccaaaagatggatttatgacacatccaaagtggcttctggagtccctgctcgcttcagtggcagtgggtctgggaccgactactctctcacaatcaacagcttggaggctgaagatgctgccacttattactgccaacagtggagtagtaacccgctcacgttcggtggcgggaccaaggtggagatcaaatccggaggtggtggatccgatatccagctgacccagtctccagcttctttggctgtgtctctagggcagagggccaccatctcctgcaaggccagccaaagtgttgattatgatggtgatagttatttgaactggtaccaacagattccaggacagccacccaaactcctcatctatgatgcatccaatctagtttctgggatcccacccaggtttagtggcagtgggtctgggacagacttcaccctcaacatccatcctgtggagaaggtggatgctgcaacctatcactgtcagcaaagtactgaggatccgtggacgttcggtggagggaccaagctcgagatcaaaggtggtggtggttctggcggcggcggctccggtggtggtggttctcaggtgcagctgcagcagtctggggctgagctggtgaggcctgggtcctcagtgaagatttcctgcaaggcttctggctatgcattcagtagctactggatgaactgggtgaagcagaggcctggacagggtcttgagtggattggacagatttggcctggagatggtgatactaactacaatggaaagttcaagggtaaagccactctgactgcagacgaatcctccagcacagcctacatgcaactcagcagcctagcatctgaggactctgcggtctatttctgtgcaagacgggagactacgacggtaggccgttattactatgctatggactactggggccaagggaccacggtcaccgtctcctcc

SEQ ID NO: 365 - protein, 499 aa, artificial sequence
  VH7VL2xCD19 HLLH
DVQLVQSGAEVKKPGASVKVSCKASGYTFTRYTMHWVRQAPGQGLEWIGYINPSRGYTNYNQKFKDRVTITTDKSTSTAYMELSSLRSEDTAVYYCARYYDDHYCLDYWGQGTTVTVSSGEGTSTGSGGSGGSGGADDIVLTQSPATLSLSPGERATLSCRASQSVSYMNWYQQKPGKAPKRWIYDTSKVASGVPARFSGSGSGTDYSLTINSLEAEDAATYYCQQWSSNPLTFGGGTKVEIKSGGGGSDIQLTQSPASLAVSLGQRATISCKASQSVDYDGDSYLNWYQQIPGQPPKLLIYDASNLVSGIPPRFSGSGSGTDFTLNIHPVEKVDAATYHCQQSTEDPWTFGGGTKLEIKGGGGSGGGGSGGGGSQVQLQQSGAELVRPGSSVKISCKASGYAFSSYWMNWVKQRPGQGLEWIGQIWPGDGDTNYNGKFKGKATLTADESSSTAYMQLSSLASEDSAVYFCARRETTTVGRYYYAMDYWGQGTTVTVSS

SEQ ID NO: 366 - DNA, 1494 bp, artificial sequence
  VL3VH7xCD19 LHHL
gacattgtactgacccagtctccagcaactctgtctctgtctccaggggagcgtgccaccctgacctgcagagccagttcaagtgtaagttacatgaactggtaccagcagaagccgggcaaggcacccaaaagatggatttatgacacatccaaagtggcttctggagtccctgctcgcttcagtggcagtgggtctgggaccgactactctctcacaatcaacagcttggaggctgaagatgctgccacttattactgccaacagtggagtagtaacccgctcacgttcggtggcgggaccaaggtggagatcaaaggcgaaggtactagtactggttctggtggaagtggaggttcaggtggagcagacgacgtccaactggtgcagtcaggggctgaagtgaaaaaacctggggcctcagtgaaggtgtcctgcaaggcttctggctacacctttactaggtacacgatgcactgggtaaggcaggcacctggacagggtctggaatggattggatacattaatcctagccgtggttatactaattacaatcagaagttcaaggaccgcgtcacaatcactacagacaaatccaccagcacagcctacatggaactgagcagcctgcgttctgaggacactgcagtctattactgtgcaagatattatgatgatcattactgccttgactactggggccaaggcaccacggtcaccgtctcctccggaggtggtggatcccaggtgcagctgcagcagtctggggctgagctggtgaggcctgggtcctcagtgaagatttcctgcaaggcttctggctatgcattcagtagctactggatgaactgggtgaagcagaggcctggacagggtcttgagtggattggacagatttggcctggagatggtgatactaactacaatggaaagttcaagggtaaagccactctgactgcagacgaatcctccagcacagcctacatgcaactcagcagcctagcatctgaggactctgcggtctatttctgtgcaagacgggagactacgacggtaggccgttattactatgctatggactactggggccaagggaccacggtcaccgtctcctccggtggtggtggttctggcggcggcggctccggtggtggtggttctgatatccagctgacccagtctccagcttctttggctgtgtctctagggcagagggccaccatctcctgcaaggccagccaaagtgttgattatgatggtgatagttatttgaactggtaccaacagattccaggacagccacccaaactcctcatctatgatgcatccaatctagtttctgggatcccacccaggtttagtggcagtgggtctgggacagacttcaccctcaacatccatcctgtggagaaggtggatgctgcaacctatcactgtcagcaaagtactgaggatccgtggacgttcggtggagggaccaagctcgagatcaaa

SEQ ID NO: 367 - protein, 498 aa, artificial sequence
  VL3VH7xCD19 LHHL
DIVLTQSPATLSLSPGERATLTCRASSSVSYMNWYQQKPGKAPKRWIYDTSKVASGVPARFSGSGSGTDYSLTINSLEAEDAATYYCQQWSSNPLTFGGGTKVEIKGEGTSTGSGGSGGSGGADDVQLVQSGAEVKKPGASVKVSCKASGYTFTRYTMHWVRQAPGQGLEWIGYINPSRGYTNYNQKFKDRVTITTDKSTSTAYMELSSLRSEDTAVYYCARYYDDHYCLDYWGQGTTVTVSSGGGGSQVQLQQSGAELVRPGSSVKISCKASGYAFSSYWMNWVKQRPGQGLEWIGQIWPGDGDTNYNGKFKGKATLTADESSSTAYMQLSSLASEDSAVYFCARRETTTVGRYYYAMDYWGQGTTVTVSSGGGGSGGGGSGGGGSDIQLTQSPASLAVSLGQRATISCKASQSVDYDGDSYLNWYQQIPGQPPKLLIYDASNLVSGIPPRFSGSGSGTDFTLNIHPVEKVDAATYHCQQSTEDPWTFGGGTKLEIK

SEQ ID NO: 368 - DNA, 1497 bp, artificial sequence
  VH7VL3xCD19 HLHL
gacgtccaactggtgcagtcaggggctgaagtgaaaaaacctggggcctcagtgaaggtgtcctgcaaggcttctggctacacctttactaggtacacgatgcactgggtaaggcaggcacctggacagggtctggaatggattggatacattaatcctagccgtggttatactaattacaatcagaagttcaaggaccgcgtcacaatcactacagacaaatccaccagcacagcctacatggaactgagcagcctgcgttctgaggacactgcagtctattactgtgcaagatattatgatgatcattactgccttgactactggggccaaggcaccacggtcaccgtctcctcaggcgaaggtactagtactggttctggtggaagtggaggttcaggtggagcagacgacattgtactgacccagtctccagcaactctgtctctgtctccaggggagcgtgccaccctgacctgcagagccagttcaagtgtaagttacatgaactggtaccagcagaagccgggcaaggcacccaaaagatggatttatgacacatccaaagtggcttctggagtccctgctcgcttcagtggcagtgggtctgggaccgactactctctcacaatcaacagcttggaggctgaagatgctgccacttattactgccaacagtggagtagtaacccgctcacgttcggtggcgggaccaaggtggagatcaaatccggaggtggtggatcccaggtgcagctgcagcagtctggggctgagctggtgaggcctgggtcctcagtgaagatttcctgcaaggcttctggctatgcattcagtagctactggatgaactgggtgaagcagaggcctggacagggtcttgagtggattggacagatttggcctggagatggtgatactaactacaatggaaagttcaagggtaaagccactctgactgcagacgaatcctccagcacagcctacatgcaactcagcagcctagcatctgaggactctgcggtctatttctgtgcaagacgggagactacgacggtaggccgttattactatgctatggactactggggccaagggaccacggtcaccgtctcctccggtggtggtggttctggcggcggcggctccggtggtggtggttctgatatccagctgacccagtctccagcttctttggctgtgtctctagggcagagggccaccatctcctgcaaggccagccaaagtgttgattatgatggtgatagttatttgaactggtaccaacagattccaggacagccacccaaactcctcatctatgatgcatccaatctagtttctgggatcccacccaggtttagtggcagtgggtctgggacagacttcaccctcaacatccatcctgtggagaaggtggatgctgcaacctatcactgtcagcaaagtactgaggatccgtggacgttcggtggagggaccaagctcgagatcaaa

SEQ ID NO: 369 - protein, 499 aa, artificial sequence
  VH7VL3xCD19 HLHL
DVQLVQSGAEVKKPGASVKVSCKASGYTFTRYTMHWVRQAPGQGLEWIGYINPSRGYTNYNQKFKDRVTITTDKSTSTAYMELSSLRSEDTAVYYCARYYDDHYCLDYWGQGTTVTVSSGEGTSTGSGGSGGSGGADDIVLTQSPATLSLSPGERATLTCRASSSVSYMNWYQQKPGKAPKRWIYDTSKVASGVPARFSGSGSGTDYSLTINSLEAEDAATYYCQQWSSNPLTFGGGTKVEIKSGGGGSQVQLQQSGAELVRPGSSVKISCKASGYAFSSYWMNWVKQRPGQGLEWIGQIWPGDGDTNYNGKFKGKATLTADESSSTAYMQLSSLASEDSAVYFCARRETTTVGRYYYAMDYWGQGTTVTVSSGGGGSGGGGSGGGGSDIQLTQSPASLAVSLGQRATISCKASQSVDYDGDSYLNWYQQIPGQPPKLLIYDASNLVSGIPPRFSGSGSGTDFTLNIHPVEKVDAATYHCQQSTEDPWTFGGGTKLEIK

SEQ ID NO: 370 - DNA, 1494 bp, artificial sequence
  VL3VH7xCD19 LHLH
gacattgtactgacccagtctccagcaactctgtctctgtctccaggggagcgtgccaccctgacctgcagagccagttcaagtgtaagttacatgaactggtaccagcagaagccgggcaaggcacccaaaagatggatttatgacacatccaaagtggcttctggagtccctgctcgcttcagtggcagtgggtctgggaccgactactctctcacaatcaacagcttggaggctgaagatgctgccacttattactgccaacagtggagtagtaacccgctcacgttcggtggcgggaccaaggtggagatcaaaggcgaaggtactagtactggttctggtggaagtggaggttcaggtggagcagacgacgtccaactggtgcagtcaggggctgaagtgaaaaaacctggggcctcagtgaaggtgtcctgcaaggcttctggctacacctttactaggtacacgatgcactgggtaaggcaggcacctggacagggtctggaatggattggatacattaatcctagccgtggttatactaattacaatcagaagttcaaggaccgcgtcacaatcactacagacaaatccaccagcacagcctacatggaactgagcagcctgcgttctgaggacactgcagtctattactgtgcaagatattatgatgatcattactgccttgactactggggccaaggcaccacggtcaccgtctcctccggaggtggtggatccgatatccagctgacccagtctccagcttctttggctgtgtctctagggcagagggccaccatctcctgcaaggccagccaaagtgttgattatgatggtgatagttatttgaactggtaccaacagattccaggacagccacccaaactcctcatctatgatgcatccaatctagtttctgggatcccacccaggtttagtggcagtgggtctgggacagacttcaccctcaacatccatcctgtggagaaggtggatgctgcaacctatcactgtcagcaaagtactgaggatccgtggacgttcggtggagggaccaagctcgagatcaaaggtggtggtggttctggcggcggcggctccggtggtggtggttctcaggtgcagctgcagcagtctggggctgagctggtgaggcctgggtcctcagtgaagatttcctgcaaggcttctggctatgcattcagtagctactggatgaactgggtgaagcagaggcctggacagggtcttgagtggattggacagatttggcctggagatggtgatactaactacaatggaaagttcaagggtaaagccactctgactgcagacgaatcctccagcacagcctacatgcaactcagcagcctagcatctgaggactctgcggtctatttctgtgcaagacgggagactacgacggtaggccgttattactatgctatggactactggggccaagggaccacggtcaccgtctcctcc

SEQ ID NO: 371 - protein, 498 aa, artificial sequence
  VL3VH7xCD19 LHLH
DIVLTQSPATLSLSPGERATLTCRASSSVSYMNWYQQKPGKAPKRWIYDTSKVASGVPARFSGSGSGTDYSLTINSLEAEDAATYYCQQWSSNPLTFGGGTKVEIKGEGTSTGSGGSGGSGGADDVQLVQSGAEVKKPGASVKVSCKASGYTFTRYTMHWVRQAPGQGLEWIGYINPSRGYTNYNQKFKDRVTITTDKSTSTAYMELSSLRSEDTAVYYCARYYDDHYCLDYWGQGTTVTVSSGGGGSDIQLTQSPASLAVSLGQRATISCKASQSVDYDGDSYLNWYQQIPGQPPKLLIYDASNLVSGIPPRFSGSGSGTDFTLNIHPVEKVDAATYHCQQSTEDPWTFGGGTKLEIKGGGGSGGGGSGGGGSQVQLQQSGAELVRPGSSVKISCKASGYAFSSYWMNWVKQRPGQGLEWIGQIWPGDGDTNYNGKFKGKATLTADESSSTAYMQLSSLASEDSAVYFCARRETTTVGRYYYAMDYWGQGTTVTVSS

SEQ ID NO: 372 - DNA, 1497 bp, artificial sequence
  VH7VL3xCD19 HLLH
gacgtccaactggtgcagtcaggggctgaagtgaaaaaacctggggcctcagtgaaggtgtcctgcaaggcttctggctacacctttactaggtacacgatgcactgggtaaggcaggcacctggacagggtctggaatggattggatacattaatcctagccgtggttatactaattacaatcagaagttcaaggaccgcgtcacaatcactacagacaaatccaccagcacagcctacatggaactgagcagcctgcgttctgaggacactgcagtctattactgtgcaagatattatgatgatcattactgccttgactactggggccaaggcaccacggtcaccgtctcctcaggcgaaggtactagtactggttctggtggaagtggaggttcaggtggagcagacgacattgtactgacccagtctccagcaactctgtctctgtctccaggggagcgtgccaccctgacctgcagagccagttcaagtgtaagttacatgaactggtaccagcagaagccgggcaaggcacccaaaagatggatttatgacacatccaaagtggcttctggagtccctgctcgcttcagtggcagtgggtctgggaccgactactctctcacaatcaacagcttggaggctgaagatgctgccacttattactgccaacagtggagtagtaacccgctcacgttcggtggcgggaccaaggtggagatcaaatccggaggtggtggatccgatatccagctgacccagtctccagcttctttggctgtgtctctagggcagagggccaccatctcctgcaaggccagccaaagtgttgattatgatggtgatagttatttgaactggtaccaacagattccaggacagccacccaaactcctcatctatgatgcatccaatctagtttctgggatcccacccaggtttagtggcagtgggtctgggacagacttcaccctcaacatccatcctgtggagaaggtggatgctgcaacctatcactgtcagcaaagtactgaggatccgtggacgttcggtggagggaccaagctcgagatcaaaggtggtggtggttctggcggcggcggctccggtggtggtggttctcaggtgcagctgcagcagtctggggctgagctggtgaggcctgggtcctcagtgaagatttcctgcaaggcttctggctatgcattcagtagctactggatgaactgggtgaagcagaggcctggacagggtcttgagtggattggacagatttggcctggagatggtgatactaactacaatggaaagttcaagggtaaagccactctgactgcagacgaatcctccagcacagcctacatgcaactcagcagcctagcatctgaggactctgcggtctatttctgtgcaagacgggagactacgacggtaggccgttattactatgctatggactactggggccaagggaccacggtcaccgtctcctcc

SEQ ID NO: 373 - protein, 499 aa, artificial sequence
  VH7VL3xCD19 HLLH
DVQLVQSGAEVKKPGASVKVSCKASGYTFTRYTMHWVRQAPGQGLEWIGYINPSRGYTNYNQKFKDRVTITTDKSTSTAYMELSSLRSEDTAVYYCARYYDDHYCLDYWGQGTTVTVSSGEGTSTGSGGSGGSGGADDIVLTQSPATLSLSPGERATLTCRASSSVSYMNWYQQKPGKAPKRWIYDTSKVASGVPARFSGSGSGTDYSLTINSLEAEDAATYYCQQWSSNPLTFGGGTKVEIKSGGGGSDIQLTQSPASLAVSLGQRATISCKASQSVDYDGDSYLNWYQQIPGQPPKLLIYDASNLVSGIPPRFSGSGSGTDFTLNIHPVEKVDAATYHCQQSTEDPWTFGGGTKLEIKGGGGSGGGGSGGGGSQVQLQQSGAELVRPGSSVKISCKASGYAFSSYWMNWVKQRPGQGLEWIGQIWPGDGDTNYNGKFKGKATLTADESSSTAYMQLSSLASEDSAVYFCARRETTTVGRYYYAMDYWGQGTTVTVSS

SEQ ID NO: 374 - DNA, 1497 bp, artificial sequence
  CD19xVH5/VL1 HLHL
caggtgcagctgcagcagtctggggctgagctggtgaggcctgggtcctcagtgaagatttcctgcaaggcttctggctatgcattcagtagctactggatgaactgggtgaagcagaggcctggacagggtcttgagtggattggacagatttggcctggagatggtgatactaactacaatggaaagttcaagggtaaagccactctgactgcagacgaatcctccagcacagcctacatgcaactcagcagcctagcatctgaggactctgcggtctatttctgtgcaagacgggagactacgacggtaggccgttattactatgctatggactactggggccaagggaccacggtcaccgtctcctccggtggtggtggttctggcggcggcggctccggtggtggtggttctgatatccagctgacccagtctccagcttctttggctgtgtctctagggcagagggccaccatctcctgcaaggccagccaaagtgttgattatgatggtgatagttatttgaactggtaccaacagattccaggacagccacccaaactcctcatctatgatgcatccaatctagtttctgggatcccacccaggtttagtggcagtgggtctgggacagacttcaccctcaacatccatcctgtggagaaggtggatgctgcaacctatcactgtcagcaaagtactgaggatccgtggacgttcggtggagggaccaagctcgagatcaaatccggaggtggtggatccgacgtccaactggtgcagtcaggggctgaagtgaaaaaacctggggcctcagtgaaggtgtcctgcaaggcttctggctacacctttactaggtacacgatgcactgggtaaggcaggcacctggacagggtctggaatggattggatacattaatcctagccgtggttatactaattacgcagacagcgtcaagggccgcttcacaatcactacagacaaatccaccagcacagcctacatggaactgagcagcctgcgttctgaggacactgcaacctattactgtgcaagatattatgatgatcattactgccttgactactggggccaaggcaccacggtcaccgtctcctcaggcgaaggtactagtactggttctggtggaagtggaggttcaggtggagcagacgacattcagatgacccagtctccatctagcctgtctgcatctgtcggggaccgtgtcaccatcacctgcagagccagtcaaagtgtaagttacatgaactggtaccagcagaagccgggcaaggcacccaaaagatggatttatgacacatccaaagtggcttctggagtccctgctcgcttcagtggcagtgggtctgggaccgactactctctcacaatcaacagcttggaggctgaagatgctgccacttattactgccaacagtggagtagtaacccgctcacgttcggtggcgggaccaaggtggagatcaaa

SEQ ID NO: 375 - protein, 499 aa, artificial sequence
  CD19xVH5VL1 HLHL
QVQLQQSGAELVRPGSSVKISCKASGYAFSSYWMNWVKQRPGQGLEWIGQIWPGDGDTNYNGKFKGKATLTADESSSTAYMQLSSLASEDSAVYFCARRETTTVGRYYYAMDYWGQGTTVTVSSGGGGSGGGGSGGGGSDIQLTQSPASLAVSLGQRATISCKASQSVDYDGDSYLNWYQQIPGQPPKLLIYDASNLVSGIPPRFSGSGSGTDFTLNIHPVEKVDAATYHCQQSTEDPWTFGGGTKLEIKSGGGGSDVQLVQSGAEVKKPGASVKVSCKASGYTFTRYTMHWVRQAPGQGLEWIGYINPSRGYTNYADSVKGRFTITTDKSTSTAYMELSSLRSEDTATYYCARYYDDHYCLDYWGQGTTVTVSSGEGTSTGSGGSGGSGGADDIQMTQSPSSLSASVGDRVTITCRASQSVSYMNWYQQKPGKAPKRWIYDTSKVASGVPARFSGSGSGTDYSLTINSLEAEDAATYYCQQWSSNPLTFGGGTKVEIK

SEQ ID NO: 376 - DNA, 1494 bp, artificial sequence
  CD19xVL1VH5 LHLH
gatatccagctgacccagtctccagcttctttggctgtgtctctagggcagagggccaccatctcctgcaaggccagccaaagtgttgattatgatggtgatagttatttgaactggtaccaacagattccaggacagccacccaaactcctcatctatgatgcatccaatctagtttctgggatcccacccaggtttagtggcagtgggtctgggacagacttcaccctcaacatccatcctgtggagaaggtggatgctgcaacctatcactgtcagcaaagtactgaggatccgtggacgttcggtggagggaccaagctcgagatcaaaggtggtggtggttctggcggcggcggctccggtggtggtggttctcaggtgcagctgcagcagtctggggctgagctggtgaggcctgggtcctcagtgaagatttcctgcaaggcttctggctatgcattcagtagctactggatgaactgggtgaagcagaggcctggacagggtcttgagtggattggacagatttggcctggagatggtgatactaactacaatggaaagttcaagggtaaagccactctgactgcagacgaatcctccagcacagcctacatgcaactcagcagcctagcatctgaggactctgcggtctatttctgtgcaagacgggagactacgacggtaggccgttattactatgctatggactactggggccaagggaccacggtcaccgtctcctccggaggtggtggatccgacattcagatgacccagtctccatctagcctgtctgcatctgtcggggaccgtgtcaccatcacctgcagagccagtcaaagtgtaagttacatgaactggtaccagcagaagccgggcaaggcacccaaaagatggatttatgacacatccaaagtggcttctggagtccctgctcgcttcagtggcagtgggtctgggaccgactactctctcacaatcaacagcttggaggctgaagatgctgccacttattactgccaacagtggagtagtaacccgctcacgttcggtggcgggaccaaggtggagatcaaaggcgaaggtactagtactggttctggtggaagtggaggttcaggtggagcagacgacgtccaactggtgcagtcaggggctgaagtgaaaaaacctggggcctcagtgaaggtgtcctgcaaggcttctggctacacctttactaggtacacgatgcactgggtaaggcaggcacctggacagggtctggaatggattggatacattaatcctagccgtggttatactaattacgcagacagcgtcaagggccgcttcacaatcactacagacaaatccaccagcacagcctacatggaactgagcagcctgcgttctgaggacactgcaacctattactgtgcaagatattatgatgatcattactgccttgactactggggccaaggcaccacggtcaccgtctcctca

SEQ ID NO: 377 - protein, 498 aa, artificial sequence
  CD19xVL1VH5 LHLH
DIQLTQSPASLAVSLGQRATISCKASQSVDYDGDSYLNWYQQIPGQPPKLLIYDASNLVSGIPPRFSGSGSGTDFTLNIHPVEKVDAATYHCQQSTEDPWTFGGGTKLEIKGGGGSGGGGSGGGGSQVQLQQSGAELVRPGSSVKISCKASGYAFSSYWMNWVKQRPGQGLEWIGQIWPGDGDTNYNGKFKGKATLTADESSSTAYMQLSSLASEDSAVYFCARRETTTVGRYYYAMDYWGQGTTVTVSSGGGGSDIQMTQSPSSLSASVGDRVTITCRASQSVSYMNWYQQKPGKAPKRWIYDTSKVASGVPARFSGSGSGTDYSLTINSLEAEDAATYYCQQWSSNPLTFGGGTKVEIKGEGTSTGSGGSGGSGGADDVQLVQSGAEVKKPGASVKVSCKASGYTFTRYTMHWVRQAPGQGLEWIGYINPSRGYTNYADSVKGRFTITTDKSTSTAYMELSSLRSEDTATYYCARYYDDHYCLDYWGQGTTVTVSS

SEQ ID NO: 378 - DNA, 1497 bp, artificial sequence
  CD19xVL1VH5 HLLH
caggtgcagctgcagcagtctggggctgagctggtgaggcctgggtcctcagtgaagatttcctgcaaggcttctggctatgcattcagtagctactggatgaactgggtgaagcagaggcctggacagggtcttgagtggattggacagatttggcctggagatggtgatactaactacaatggaaagttcaagggtaaagccactctgactgcagacgaatcctccagcacagcctacatgcaactcagcagcctagcatctgaggactctgcggtctatttctgtgcaagacgggagactacgacggtaggccgttattactatgctatggactactggggccaagggaccacggtcaccgtctcctccggtggtggtggttctggcggcggcggctccggtggtggtggttctgatatccagctgacccagtctccagcttctttggctgtgtctctagggcagagggccaccatctcctgcaaggccagccaaagtgttgattatgatggtgatagttatttgaactggtaccaacagattccaggacagccacccaaactcctcatctatgatgcatccaatctagtttctgggatcccacccaggtttagtggcagtgggtctgggacagacttcaccctcaacatccatcctgtggagaaggtggatgctgcaacctatcactgtcagcaaagtactgaggatccgtggacgttcggtggagggaccaagctcgagatcaaatccggaggtggtggatccgacattcagatgacccagtctccatctagcctgtctgcatctgtcggggaccgtgtcaccatcacctgcagagccagtcaaagtgtaagttacatgaactggtaccagcagaagccgggcaaggcacccaaaagatggatttatgacacatccaaagtggcttctggagtccctgctcgcttcagtggcagtgggtctgggaccgactactctctcacaatcaacagcttggaggctgaagatgctgccacttattactgccaacagtggagtagtaacccgctcacgttcggtggcgggaccaaggtggagatcaaaggcgaaggtactagtactggttctggtggaagtggaggttcaggtggagcagacgacgtccaactggtgcagtcaggggctgaagtgaaaaaacctggggcctcagtgaaggtgtcctgcaaggcttctggctacacctttactaggtacacgatgcactgggtaaggcaggcacctggacagggtctggaatggattggatacattaatcctagccgtggttatactaattacgcagacagcgtcaagggccgcttcacaatcactacagacaaatccaccagcacagcctacatggaactgagcagcctgcgttctgaggacactgcaacctattactgtgcaagatattatgatgatcattactgccttgactactggggccaaggcaccacggtcaccgtctcctca

SEQ ID NO: 379 - protein, 499 aa, artificial sequence
  CD19xVL1VH5 HLLH
QVQLQQSGAELVRPGSSVKISCKASGYAFSSYWMNWVKQRPGQGLEWIGQIWPGDGDTNYNGKFKGKATLTADESSSTAYMQLSSLASEDSAVYFCARRETTTVGRYYYAMDYWGQGTTVTVSSGGGGSGGGGSGGGGSDIQLTQSPASLAVSLGQRATISCKASQSVDYDGDSYLNWYQQIPGQPPKLLIYDASNLVSGIPPRFSGSGSGTDFTLNIHPVEKVDAATYHCQQSTEDPWTFGGGTKLEIKSGGGGSDIQMTQSPSSLSASVGDRVTITCRASQSVSYMNWYQQKPGKAPKRWIYDTSKVASGVPARFSGSGSGTDYSLTINSLEAEDAATYYCQQWSSNPLTFGGGTKVEIKGEGTSTGSGGSGGSGGADDVQLVQSGAEVKKPGASVKVSCKASGYTFTRYTMHWVRQAPGQGLEWIGYINPSRGYTNYADSVKGRFTITTDKSTSTAYMELSSLRSEDTATYYCARYYDDHYCLDYWGQGTTVTVSS

SEQ ID NO: 380 - DNA, 1497 bp, artificial sequence
  CD19xVH5VL2 HLHL
caggtgcagctgcagcagtctggggctgagctggtgaggcctgggtcctcagtgaagatttcctgcaaggcttctggctatgcattcagtagctactggatgaactgggtgaagcagaggcctggacagggtcttgagtggattggacagatttggcctggagatggtgatactaactacaatggaaagttcaagggtaaagccactctgactgcagacgaatcctccagcacagcctacatgcaactcagcagcctagcatctgaggactctgcggtctatttctgtgcaagacgggagactacgacggtaggccgttattactatgctatggactactggggccaagggaccacggtcaccgtctcctccggtggtggtggttctggcggcggcggctccggtggtggtggttctgatatccagctgacccagtctccagcttctttggctgtgtctctagggcagagggccaccatctcctgcaaggccagccaaagtgttgattatgatggtgatagttatttgaactggtaccaacagattccaggacagccacccaaactcctcatctatgatgcatccaatctagtttctgggatcccacccaggtttagtggcagtgggtctgggacagacttcaccctcaacatccatcctgtggagaaggtggatgctgcaacctatcactgtcagcaaagtactgaggatccgtggacgttcggtggagggaccaagctcgagatcaaatccggaggtggtggatccgacgtccaactggtgcagtcaggggctgaagtgaaaaaacctggggcctcagtgaaggtgtcctgcaaggcttctggctacacctttactaggtacacgatgcactgggtaaggcaggcacctggacagggtctggaatggattggatacattaatcctagccgtggttatactaattacgcagacagcgtcaagggccgcttcacaatcactacagacaaatccaccagcacagcctacatggaactgagcagcctgcgttctgaggacactgcaacctattactgtgcaagatattatgatgatcattactgccttgactactggggccaaggcaccacggtcaccgtctcctcaggcgaaggtactagtactggttctggtggaagtggaggttcaggtggagcagacgacattgtactgacccagtctccagcaactctgtctctgtctccaggggagcgtgccaccctgagctgcagagccagtcaaagtgtaagttacatgaactggtaccagcagaagccgggcaaggcacccaaaagatggatttatgacacatccaaagtggcttctggagtccctgctcgcttcagtggcagtgggtctgggaccgactactctctcacaatcaacagcttggaggctgaagatgctgccacttattactgccaacagtggagtagtaacccgctcacgttcggtggcgggaccaaggtggagatcaaa

SEQ ID NO: 381 - protein, 499 aa, artificial sequence
  CD19xVH5VL2 HLHL
QVQLQQSGAELVRPGSSVKISCKASGYAFSSYWMNWVKQRPGQGLEWIGQIWPGDGDTNYNGKFKGKATLTADESSSTAYMQLSSLASEDSAVYFCARRETTTVGRYYYAMDYWGQGTTVTVSSGGGGSGGGGSGGGGSDIQLTQSPASLAVSLGQRATISCKASQSVDYDGDSYLNWYQQIPGQPPKLLIYDASNLVSGIPPRFSGSGSGTDFTLNIHPVEKVDAATYHCQQSTEDPWTFGGGTKLEIKSGGGGSDVQLVQSGAEVKKPGASVKVSCKASGYTFTRYTMHWVRQAPGQGLEWIGYINPSRGYTNYADSVKGRFTITTDKSTSTAYMELSSLRSEDTATYYCARYYDDHYCLDYWGQGTTVTVSSGEGTSTGSGGSGGSGGADDIVLTQSPATLSLSPGERATLSCRASQSVSYMNWYQQKPGKAPKRWIYDTSKVASGVPARFSGSGSGTDYSLTINSLEAEDAATYYCQQWSSNPLTFGGGTKVEIK

SEQ ID NO: 382 - DNA, 1494 bp, artificial sequence
  CD19xVL2VH5 LHLH
gatatccagctgacccagtctccagcttctttggctgtgtctctagggcagagggccaccatctcctgcaaggccagccaaagtgttgattatgatggtgatagttatttgaactggtaccaacagattccaggacagccacccaaactcctcatctatgatgcatccaatctagtttctgggatcccacccaggtttagtggcagtgggtctgggacagacttcaccctcaacatccatcctgtggagaaggtggatgctgcaacctatcactgtcagcaaagtactgaggatccgtggacgttcggtggagggaccaagctcgagatcaaaggtggtggtggttctggcggcggcggctccggtggtggtggttctcaggtgcagctgcagcagtctggggctgagctggtgaggcctgggtcctcagtgaagatttcctgcaaggcttctggctatgcattcagtagctactggatgaactgggtgaagcagaggcctggacagggtcttgagtggattggacagatttggcctggagatggtgatactaactacaatggaaagttcaagggtaaagccactctgactgcagacgaatcctccagcacagcctacatgcaactcagcagcctagcatctgaggactctgcggtctatttctgtgcaagacgggagactacgacggtaggccgttattactatgctatggactactggggccaagggaccacggtcaccgtctcctccggaggtggtggatccgacattgtactgacccagtctccagcaactctgtctctgtctccaggggagcgtgccaccctgagctgcagagccagtcaaagtgtaagttacatgaactggtaccagcagaagccgggcaaggcacccaaaagatggatttatgacacatccaaagtggcttctggagtccctgctcgcttcagtggcagtgggtctgggaccgactactctctcacaatcaacagcttggaggctgaagatgctgccacttattactgccaacagtggagtagtaacccgctcacgttcggtggcgggaccaaggtggagatcaaaggcgaaggtactagtactggttctggtggaagtggaggttcaggtggagcagacgacgtccaactggtgcagtcaggggctgaagtgaaaaaacctggggcctcagtgaaggtgtcctgcaaggcttctggctacacctttactaggtacacgatgcactgggtaaggcaggcacctggacagggtctggaatggattggatacattaatcctagccgtggttatactaattacgcagacagcgtcaagggccgcttcacaatcactacagacaaatccaccagcacagcctacatggaactgagcagcctgcgttctgaggacactgcaacctattactgtgcaagatattatgatgatcattactgccttgactactggggccaaggcaccacggtcaccgtctcctca

SEQ ID NO: 383 - protein, 498 aa, artificial sequence
  CD19xVL2VH5 LHLH
DIQLTQSPASLAVSLGQRATISCKASQSVDYDGDSYLNWYQQIPGQPPKLLIYDASNLVSGIPPRFSGSGSGTDFTLNIHPVEKVDAATYHCQQSTEDPWTFGGGTKLEIKGGGGSGGGGSGGGGSQVQLQQSGAELVRPGSSVKISCKASGYAFSSYWMNWVKQRPGQGLEWIGQIWPGDGDTNYNGKFKGKATLTADESSSTAYMQLSSLASEDSAVYFCARRETTTVGRYYYAMDYWGQGTTVTVSSGGGGSDIVLTQSPATLSLSPGERATLSCRASQSVSYMNWYQQKPGKAPKRWIYDTSKVASGVPARFSGSGSGTDYSLTINSLEAEDAATYYCQQWSSNPLTFGGGTKVEIKGEGTSTGSGGSGGSGGADDVQLVQSGAEVKKPGASVKVSCKASGYTFTRYTMHWVRQAPGQGLEWIGYINPSRGYTNYADSVKGRFTITTDKSTSTAYMELSSLRSEDTATYYCARYYDDHYCLDYWGQGTTVTVSS

SEQ ID NO: 384 - DNA, 1497 bp, artificial sequence
  CD19xVL2VH5 HLLH
caggtgcagctgcagcagtctggggctgagctggtgaggcctgggtcctcagtgaagatttcctgcaaggcttctggctatgcattcagtagctactggatgaactgggtgaagcagaggcctggacagggtcttgagtggattggacagatttggcctggagatggtgatactaactacaatggaaagttcaagggtaaagccactctgactgcagacgaatcctccagcacagcctacatgcaactcagcagcctagcatctgaggactctgcggtctatttctgtgcaagacgggagactacgacggtaggccgttattactatgctatggactactggggccaagggaccacggtcaccgtctcctccggtggtggtggttctggcggcggcggctccggtggtggtggttctgatatccagctgacccagtctccagcttctttggctgtgtctctagggcagagggccaccatctcctgcaaggccagccaaagtgttgattatgatggtgatagttatttgaactggtaccaacagattccaggacagccacccaaactcctcatctatgatgcatccaatctagtttctgggatcccacccaggtttagtggcagtgggtctgggacagacttcaccctcaacatccatcctgtggagaaggtggatgctgcaacctatcactgtcagcaaagtactgaggatccgtggacgttcggtggagggaccaagctcgagatcaaatccggaggtggtggatccgacattgtactgacccagtctccagcaactctgtctctgtctccaggggagcgtgccaccctgagctgcagagccagtcaaagtgtaagttacatgaactggtaccagcagaagccgggcaaggcacccaaaagatggatttatgacacatccaaagtggcttctggagtccctgctcgcttcagtggcagtgggtctgggaccgactactctctcacaatcaacagcttggaggctgaagatgctgccacttattactgccaacagtggagtagtaacccgctcacgttcggtggcgggaccaaggtggagatcaaaggcgaaggtactagtactggttctggtggaagtggaggttcaggtggagcagacgacgtccaactggtgcagtcaggggctgaagtgaaaaaacctggggcctcagtgaaggtgtcctgcaaggcttctggctacacctttactaggtacacgatgcactgggtaaggcaggcacctggacagggtctggaatggattggatacattaatcctagccgtggttatactaattacgcagacagcgtcaagggccgcttcacaatcactacagacaaatccaccagcacagcctacatggaactgagcagcctgcgttctgaggacactgcaacctattactgtgcaagatattatgatgatcattactgccttgactactggggccaaggcaccacggtcaccgtctcctca

SEQ ID NO: 385 - protein, 499 aa, artificial sequence
  CD19xVL2VH5 HLLH
QVQLQQSGAELVRPGSSVKISCKASGYAFSSYWMNWVKQRPGQGLEWIGQIWPGDGDTNYNGKFKGKATLTADESSSTAYMQLSSLASEDSAVYFCARRETTTVGRYYYAMDYWGQGTTVTVSSGGGGSGGGGSGGGGSDIQLTQSPASLAVSLGQRATISCKASQSVDYDGDSYLNWYQQIPGQPPKLLIYDASNLVSGIPPRFSGSGSGTDFTLNIHPVEKVDAATYHCQQSTEDPWTFGGGTKLEIKSGGGGSDIVLTQSPATLSLSPGERATLSCRASQSVSYMNWYQQKPGKAPKRWIYDTSKVASGVPARFSGSGSGTDYSLTINSLEAEDAATYYCQQWSSNPLTFGGGTKVEIKGEGTSTGSGGSGGSGGADDVQLVQSGAEVKKPGASVKVSCKASGYTFTRYTMHWVRQAPGQGLEWIGYINPSRGYTNYADSVKGRFTITTDKSTSTAYMELSSLRSEDTATYYCARYYDDHYCLDYWGQGTTVTVSS

SEQ ID NO: 386 - DNA, 1497 bp, artificial sequence
  CD19xVH5VL3 HLHL
caggtgcagctgcagcagtctggggctgagctggtgaggcctgggtcctcagtgaagatttcctgcaaggcttctggctatgcattcagtagctactggatgaactgggtgaagcagaggcctggacagggtcttgagtggattggacagatttggcctggagatggtgatactaactacaatggaaagttcaagggtaaagccactctgactgcagacgaatcctccagcacagcctacatgcaactcagcagcctagcatctgaggactctgcggtctatttctgtgcaagacgggagactacgacggtaggccgttattactatgctatggactactggggccaagggaccacggtcaccgtctcctccggtggtggtggttctggcggcggcggctccggtggtggtggttctgatatccagctgacccagtctccagcttctttggctgtgtctctagggcagagggccaccatctcctgcaaggccagccaaagtgttgattatgatggtgatagttatttgaactggtaccaacagattccaggacagccacccaaactcctcatctatgatgcatccaatctagtttctgggatcccacccaggtttagtggcagtgggtctgggacagacttcaccctcaacatccatcctgtggagaaggtggatgctgcaacctatcactgtcagcaaagtactgaggatccgtggacgttcggtggagggaccaagctcgagatcaaatccggaggtggtggatccgacgtccaactggtgcagtcaggggctgaagtgaaaaaacctggggcctcagtgaaggtgtcctgcaaggcttctggctacacctttactaggtacacgatgcactgggtaaggcaggcacctggacagggtctggaatggattggatacattaatcctagccgtggttatactaattacgcagacagcgtcaagggccgcttcacaatcactacagacaaatccaccagcacagcctacatggaactgagcagcctgcgttctgaggacactgcaacctattactgtgcaagatattatgatgatcattactgccttgactactggggccaaggcaccacggtcaccgtctcctcaggcgaaggtactagtactggttctggtggaagtggaggttcaggtggagcagacgacattgtactgacccagtctccagcaactctgtctctgtctccaggggagcgtgccaccctgacctgcagagccagttcaagtgtaagttacatgaactggtaccagcagaagccgggcaaggcacccaaaagatggatttatgacacatccaaagtggcttctggagtccctgctcgcttcagtggcagtgggtctgggaccgactactctctcacaatcaacagcttggaggctgaagatgctgccacttattactgccaacagtggagtagtaacccgctcacgttcggtggcgggaccaaggtggagatcaaa

SEQ ID NO: 387 - protein, 499 aa, artificial sequence
  CD19xVH5VL3 HLHL
QVQLQQSGAELVRPGSSVKISCKASGYAFSSYWMNWVKQRPGQGLEWIGQIWPGDGDTNYNGKFKGKATLTADESSSTAYMQLSSLASEDSAVYFCARRETTTVGRYYYAMDYWGQGTTVTVSSGGGGSGGGGSGGGGSDIQLTQSPASLAVSLGQRATISCKASQSVDYDGDSYLNWYQQIPGQPPKLLIYDASNLVSGIPPRFSGSGSGTDFTLNIHPVEKVDAATYHCQQSTEDPWTFGGGTKLEIKSGGGGSDVQLVQSGAEVKKPGASVKVSCKASGYTFTRYTMHWVRQAPGQGLEWIGYINPSRGYTNYADSVKGRFTITTDKSTSTAYMELSSLRSEDTATYYCARYYDDHYCLDYWGQGTTVTVSSGEGTSTGSGGSGGSGGADDIVLTQSPATLSLSPGERATLTCRASSSVSYMNWYQQKPGKAPKRWIYDTSKVASGVPARFSGSGSGTDYSLTINSLEAEDAATYYCQQWSSNPLTFGGGTKVEIK

SEQ ID NO: 388 - DNA, 1494 bp, artificial sequence
  CD19xVL3VH5 LHLH
gatatccagctgacccagtctccagcttctttggctgtgtctctagggcagagggccaccatctcctgcaaggccagccaaagtgttgattatgatggtgatagttatttgaactggtaccaacagattccaggacagccacccaaactcctcatctatgatgcatccaatctagtttctgggatcccacccaggtttagtggcagtgggtctgggacagacttcaccctcaacatccatcctgtggagaaggtggatgctgcaacctatcactgtcagcaaagtactgaggatccgtggacgttcggtggagggaccaagctcgagatcaaaggtggtggtggttctggcggcggcggctccggtggtggtggttctcaggtgcagctgcagcagtctggggctgagctggtgaggcctgggtcctcagtgaagatttcctgcaaggcttctggctatgcattcagtagctactggatgaactgggtgaagcagaggcctggacagggtcttgagtggattggacagatttggcctggagatggtgatactaactacaatggaaagttcaagggtaaagccactctgactgcagacgaatcctccagcacagcctacatgcaactcagcagcctagcatctgaggactctgcggtctatttctgtgcaagacgggagactacgacggtaggccgttattactatgctatggactactggggccaagggaccacggtcaccgtctcctccggaggtggtggatccgacattgtactgacccagtctccagcaactctgtctctgtctccaggggagcgtgccaccctgacctgcagagccagttcaagtgtaagttacatgaactggtaccagcagaagccgggcaaggcacccaaaagatggatttatgacacatccaaagtggcttctggagtccctgctcgcttcagtggcagtgggtctgggaccgactactctctcacaatcaacagcttggaggctgaagatgctgccacttattactgccaacagtggagtagtaacccgctcacgttcggtggcgggaccaaggtggagatcaaaggcgaaggtactagtactggttctggtggaagtggaggttcaggtggagcagacgacgtccaactggtgcagtcaggggctgaagtgaaaaaacctggggcctcagtgaaggtgtcctgcaaggcttctggctacacctttactaggtacacgatgcactgggtaaggcaggcacctggacagggtctggaatggattggatacattaatcctagccgtggttatactaattacgcagacagcgtcaagggccgcttcacaatcactacagacaaatccaccagcacagcctacatggaactgagcagcctgcgttctgaggacactgcaacctattactgtgcaagatattatgatgatcattactgccttgactactggggccaaggcaccacggtcaccgtctcctca

SEQ ID NO: 389 - protein, 498 aa, artificial sequence
  CD19xVL3VH5 LHLH
DIQLTQSPASLAVSLGQRATISCKASQSVDYDGDSYLNWYQQIPGQPPKLLIYDASNLVSGIPPRFSGSGSGTDFTLNIHPVEKVDAATYHCQQSTEDPWTFGGGTKLEIKGGGGSGGGGSGGGGSQVQLQQSGAELVRPGSSVKISCKASGYAFSSYWMNWVKQRPGQGLEWIGQIWPGDGDTNYNGKFKGKATLTADESSSTAYMQLSSLASEDSAVYFCARRETTTVGRYYYAMDYWGQGTTVTVSSGGGGSDIVLTQSPATLSLSPGERATLTCRASSSVSYMNWYQQKPGKAPKRWIYDTSKVASGVPARFSGSGSGTDYSLTINSLEAEDAATYYCQQWSSNPLTFGGGTKVEIKGEGTSTGSGGSGGSGGADDVQLVQSGAEVKKPGASVKVSCKASGYTFTRYTMHWVRQAPGQGLEWIGYINPSRGYTNYADSVKGRFTITTDKSTSTAYMELSSLRSEDTATYYCARYYDDHYCLDYWGQGTTVTVSS

SEQ ID NO: 390 - DNA, 1497 bp, artificial sequence
  CD19xVL3VH5 HLLH
caggtgcagctgcagcagtctggggctgagctggtgaggcctgggtcctcagtgaagatttcctgcaaggcttctggctatgcattcagtagctactggatgaactgggtgaagcagaggcctggacagggtcttgagtggattggacagatttggcctggagatggtgatactaactacaatggaaagttcaagggtaaagccactctgactgcagacgaatcctccagcacagcctacatgcaactcagcagcctagcatctgaggactctgcggtctatttctgtgcaagacgggagactacgacggtaggccgttattactatgctatggactactggggccaagggaccacggtcaccgtctcctccggtggtggtggttctggcggcggcggctccggtggtggtggttctgatatccagctgacccagtctccagcttctttggctgtgtctctagggcagagggccaccatctcctgcaaggccagccaaagtgttgattatgatggtgatagttatttgaactggtaccaacagattccaggacagccacccaaactcctcatctatgatgcatccaatctagtttctgggatcccacccaggtttagtggcagtgggtctgggacagacttcaccctcaacatccatcctgtggagaaggtggatgctgcaacctatcactgtcagcaaagtactgaggatccgtggacgttcggtggagggaccaagctcgagatcaaatccggaggtggtggatccgacattgtactgacccagtctccagcaactctgtctctgtctccaggggagcgtgccaccctgacctgcagagccagttcaagtgtaagttacatgaactggtaccagcagaagccgggcaaggcacccaaaagatggatttatgacacatccaaagtggcttctggagtccctgctcgcttcagtggcagtgggtctgggaccgactactctctcacaatcaacagcttggaggctgaagatgctgccacttattactgccaacagtggagtagtaacccgctcacgttcggtggcgggaccaaggtggagatcaaaggcgaaggtactagtactggttctggtggaagtggaggttcaggtggagcagacgacgtccaactggtgcagtcaggggctgaagtgaaaaaacctggggcctcagtgaaggtgtcctgcaaggcttctggctacacctttactaggtacacgatgcactgggtaaggcaggcacctggacagggtctggaatggattggatacattaatcctagccgtggttatactaattacgcagacagcgtcaagggccgcttcacaatcactacagacaaatccaccagcacagcctacatggaactgagcagcctgcgttctgaggacactgcaacctattactgtgcaagatattatgatgatcattactgccttgactactggggccaaggcaccacggtcaccgtctcctca

SEQ ID NO: 391 - protein, 499 aa, artificial sequence
  CD19xVL3VH5 HLLH
QVQLQQSGAELVRPGSSVKISCKASGYAFSSYWMNWVKQRPGQGLEWIGQIWPGDGDTNYNGKFKGKATLTADESSSTAYMQLSSLASEDSAVYFCARRETTTVGRYYYAMDYWGQGTTVTVSSGGGGSGGGGSGGGGSDIQLTQSPASLAVSLGQRATISCKASQSVDYDGDSYLNWYQQIPGQPPKLLIYDASNLVSGIPPRFSGSGSGTDFTLNIHPVEKVDAATYHCQQSTEDPWTFGGGTKLEIKSGGGGSDIVLTQSPATLSLSPGERATLTCRASSSVSYMNWYQQKPGKAPKRWIYDTSKVASGVPARFSGSGSGTDYSLTINSLEAEDAATYYCQQWSSNPLTFGGGTKVEIKGEGTSTGSGGSGGSGGADDVQLVQSGAEVKKPGASVKVSCKASGYTFTRYTMHWVRQAPGQGLEWIGYINPSRGYTNYADSVKGRFTITTDKSTSTAYMELSSLRSEDTATYYCARYYDDHYCLDYWGQGTTVTVSS

SEQ ID NO: 392 - DNA, 1497 bp, artificial sequence
  CD19xVH7VL1 HLHL
caggtgcagctgcagcagtctggggctgagctggtgaggcctgggtcctcagtgaagatttcctgcaaggcttctggctatgcattcagtagctactggatgaactgggtgaagcagaggcctggacagggtcttgagtggattggacagatttggcctggagatggtgatactaactacaatggaaagttcaagggtaaagccactctgactgcagacgaatcctccagcacagcctacatgcaactcagcagcctagcatctgaggactctgcggtctatttctgtgcaagacgggagactacgacggtaggccgttattactatgctatggactactggggccaagggaccacggtcaccgtctcctccggtggtggtggttctggcggcggcggctccggtggtggtggttctgatatccagctgacccagtctccagcttctttggctgtgtctctagggcagagggccaccatctcctgcaaggccagccaaagtgttgattatgatggtgatagttatttgaactggtaccaacagattccaggacagccacccaaactcctcatctatgatgcatccaatctagtttctgggatcccacccaggtttagtggcagtgggtctgggacagacttcaccctcaacatccatcctgtggagaaggtggatgctgcaacctatcactgtcagcaaagtactgaggatccgtggacgttcggtggagggaccaagctcgagatcaaatccggaggtggtggatccgacgtccaactggtgcagtcaggggctgaagtgaaaaaacctggggcctcagtgaaggtgtcctgcaaggcttctggctacacctttactaggtacacgatgcactgggtaaggcaggcacctggacagggtctggaatggattggatacattaatcctagccgtggttatactaattacaatcagaagttcaaggaccgcgtcacaatcactacagacaaatccaccagcacagcctacatggaactgagcagcctgcgttctgaggacactgcagtctattactgtgcaagatattatgatgatcattactgccttgactactggggccaaggcaccacggtcaccgtctcctcaggcgaaggtactagtactggttctggtggaagtggaggttcaggtggagcagacgacattcagatgacccagtctccatctagcctgtctgcatctgtcggggaccgtgtcaccatcacctgcagagccagtcaaagtgtaagttacatgaactggtaccagcagaagccgggcaaggcacccaaaagatggatttatgacacatccaaagtggcttctggagtccctgctcgcttcagtggcagtgggtctgggaccgactactctctcacaatcaacagcttggaggctgaagatgctgccacttattactgccaacagtggagtagtaacccgctcacgttcggtggcgggaccaaggtggagatcaaa

SEQ ID NO: 393 - protein, 499 aa, artificial sequence
  CD19xVH7VL1 HLHL
QVQLQQSGAELVRPGSSVKISCKASGYAFSSYWMNWVKQRPGQGLEWIGQIWPGDGDTNYNGKFKGKATLTADESSSTAYMQLSSLASEDSAVYFCARRETTTVGRYYYAMDYWGQGTTVTVSSGGGGSGGGGSGGGGSDIQLTQSPASLAVSLGQRATISCKASQSVDYDGDSYLNWYQQIPGQPPKLLIYDASNLVSGIPPRFSGSGSGTDFTLNIHPVEKVDAATYHCQQSTEDPWTFGGGTKLEIKSGGGGSDVQLVQSGAEVKKPGASVKVSCKASGYTFTRYTMHWVRQAPGQGLEWIGYINPSRGYTNYNQKFKDRVTITTDKSTSTAYMELSSLRSEDTAVYYCARYYDDHYCLDYWGQGTTVTVSSGEGTSTGSGGSGGSGGADDIQMTQSPSSLSASVGDRVTITCRASQSVSYMNWYQQKPGKAPKRWIYDTSKVASGVPARFSGSGSGTDYSLTINSLEAEDAATYYCQQWSSNPLTFGGGTKVEIK

SEQ ID NO: 394 - DNA, 1494 bp, artificial sequence
  CD19xVL1VH7 LHLH
gatatccagctgacccagtctccagcttctttggctgtgtctctagggcagagggccaccatctcctgcaaggccagccaaagtgttgattatgatggtgatagttatttgaactggtaccaacagattccaggacagccacccaaactcctcatctatgatgcatccaatctagtttctgggatcccacccaggtttagtggcagtgggtctgggacagacttcaccctcaacatccatcctgtggagaaggtggatgctgcaacctatcactgtcagcaaagtactgaggatccgtggacgttcggtggagggaccaagctcgagatcaaaggtggtggtggttctggcggcggcggctccggtggtggtggttctcaggtgcagctgcagcagtctggggctgagctggtgaggcctgggtcctcagtgaagatttcctgcaaggcttctggctatgcattcagtagctactggatgaactgggtgaagcagaggcctggacagggtcttgagtggattggacagatttggcctggagatggtgatactaactacaatggaaagttcaagggtaaagccactctgactgcagacgaatcctccagcacagcctacatgcaactcagcagcctagcatctgaggactctgcggtctatttctgtgcaagacgggagactacgacggtaggccgttattactatgctatggactactggggccaagggaccacggtcaccgtctcctccggaggtggtggatccgacattcagatgacccagtctccatctagcctgtctgcatctgtcggggaccgtgtcaccatcacctgcagagccagtcaaagtgtaagttacatgaactggtaccagcagaagccgggcaaggcacccaaaagatggatttatgacacatccaaagtggcttctggagtccctgctcgcttcagtggcagtgggtctgggaccgactactctctcacaatcaacagcttggaggctgaagatgctgccacttattactgccaacagtggagtagtaacccgctcacgttcggtggcgggaccaaggtggagatcaaaggcgaaggtactagtactggttctggtggaagtggaggttcaggtggagcagacgacgtccaactggtgcagtcaggggctgaagtgaaaaaacctggggcctcagtgaaggtgtcctgcaaggcttctggctacacctttactaggtacacgatgcactgggtaaggcaggcacctggacagggtctggaatggattggatacattaatcctagccgtggttatactaattacaatcagaagttcaaggaccgcgtcacaatcactacagacaaatccaccagcacagcctacatggaactgagcagcctgcgttctgaggacactgcagtctattactgtgcaagatattatgatgatcattactgccttgactactggggccaaggcaccacggtcaccgtctcctca

SEQ ID NO: 395 - protein, 498 aa, artificial sequence
  CD19xVL1VH7 LHLH
DIQLTQSPASLAVSLGQRATISCKASQSVDYDGDSYLNWYQQIPGQPPKLLIYDASNLVSGIPPRFSGSGSGTDFTLNIHPVEKVDAATYHCQQSTEDPWTFGGGTKLEIKGGGGSGGGGSGGGGSQVQLQQSGAELVRPGSSVKISCKASGYAFSSYWMNWVKQRPGQGLEWIGQIWPGDGDTNYNGKFKGKATLTADESSSTAYMQLSSLASEDSAVYFCARRETTTVGRYYYAMDYWGQGTTVTVSSGGGGSDIQMTQSPSSLSASVGDRVTITCRASQSVSYMNWYQQKPGKAPKRWIYDTSKVASGVPARFSGSGSGTDYSLTINSLEAEDAATYYCQQWSSNPLTFGGGTKVEIKGEGTSTGSGGSGGSGGADDVQLVQSGAEVKKPGASVKVSCKASGYTFTRYTMHWVRQAPGQGLEWIGYINPSRGYTNYNQKFKDRVTITTDKSTSTAYMELSSLRSEDTAVYYCARYYDDHYCLDYWGQGTTVTVSS

SEQ ID NO: 396 - DNA, 1497 bp, artificial sequence
  CD19xVL1VH7 HLLH
caggtgcagctgcagcagtctggggctgagctggtgaggcctgggtcctcagtgaagatttcctgcaaggcttctggctatgcattcagtagctactggatgaactgggtgaagcagaggcctggacagggtcttgagtggattggacagatttggcctggagatggtgatactaactacaatggaaagttcaagggtaaagccactctgactgcagacgaatcctccagcacagcctacatgcaactcagcagcctagcatctgaggactctgcggtctatttctgtgcaagacgggagactacgacggtaggccgttattactatgctatggactactggggccaagggaccacggtcaccgtctcctccggtggtggtggttctggcggcggcggctccggtggtggtggttctgatatccagctgacccagtctccagcttctttggctgtgtctctagggcagagggccaccatctcctgcaaggccagccaaagtgttgattatgatggtgatagttatttgaactggtaccaacagattccaggacagccacccaaactcctcatctatgatgcatccaatctagtttctgggatcccacccaggtttagtggcagtgggtctgggacagacttcaccctcaacatccatcctgtggagaaggtggatgctgcaacctatcactgtcagcaaagtactgaggatccgtggacgttcggtggagggaccaagctcgagatcaaatccggaggtggtggatccgacattcagatgacccagtctccatctagcctgtctgcatctgtcggggaccgtgtcaccatcacctgcagagccagtcaaagtgtaagttacatgaactggtaccagcagaagccgggcaaggcacccaaaagatggatttatgacacatccaaagtggcttctggagtccctgctcgcttcagtggcagtgggtctgggaccgactactctctcacaatcaacagcttggaggctgaagatgctgccacttattactgccaacagtggagtagtaacccgctcacgttcggtggcgggaccaaggtggagatcaaaggcgaaggtactagtactggttctggtggaagtggaggttcaggtggagcagacgacgtccaactggtgcagtcaggggctgaagtgaaaaaacctggggcctcagtgaaggtgtcctgcaaggcttctggctacacctttactaggtacacgatgcactgggtaaggcaggcacctggacagggtctggaatggattggatacattaatcctagccgtggttatactaattacaatcagaagttcaaggaccgcgtcacaatcactacagacaaatccaccagcacagcctacatggaactgagcagcctgcgttctgaggacactgcagtctattactgtgcaagatattatgatgatcattactgccttgactactggggccaaggcaccacggtcaccgtctcctca

SEQ ID NO: 397 - protein, 499 aa, artificial sequence
  CD19xVL1VH7 HLLH
QVQLQQSGAELVRPGSSVKISCKASGYAFSSYWMNWVKQRPGQGLEWIGQIWPGDGDTNYNGKFKGKATLTADESSSTAYMQLSSLASEDSAVYFCARRETTTVGRYYYAMDYWGQGTTVTVSSGGGGSGGGGSGGGGSDIQLTQSPASLAVSLGQRATISCKASQSVDYDGDSYLNWYQQIPGQPPKLLIYDASNLVSGIPPRFSGSGSGTDFTLNIHPVEKVDAATYHCQQSTEDPWTFGGGTKLEIKSGGGGSDIQMTQSPSSLSASVGDRVTITCRASQSVSYMNWYQQKPGKAPKRWIYDTSKVASGVPARFSGSGSGTDYSLTINSLEAEDAATYYCQQWSSNPLTFGGGTKVEIKGEGTSTGSGGSGGSGGADDVQLVQSGAEVKKPGASVKVSCKASGYTFTRYTMHWVRQAPGQGLEWIGYINPSRGYTNYNQKFKDRVTITTDKSTSTAYMELSSLRSEDTAVYYCARYYDDHYCLDYWGQGTTVTVSS

SEQ ID NO: 398 - DNA, 1497 bp, artificial sequence
  CD19xVH7VL2 HLHL
caggtgcagctgcagcagtctggggctgagctggtgaggcctgggtcctcagtgaagatttcctgcaaggcttctggctatgcattcagtagctactggatgaactgggtgaagcagaggcctggacagggtcttgagtggattggacagatttggcctggagatggtgatactaactacaatggaaagttcaagggtaaagccactctgactgcagacgaatcctccagcacagcctacatgcaactcagcagcctagcatctgaggactctgcggtctatttctgtgcaagacgggagactacgacggtaggccgttattactatgctatggactactggggccaagggaccacggtcaccgtctcctccggtggtggtggttctggcggcggcggctccggtggtggtggttctgatatccagctgacccagtctccagcttctttggctgtgtctctagggcagagggccaccatctcctgcaaggccagccaaagtgttgattatgatggtgatagttatttgaactggtaccaacagattccaggacagccacccaaactcctcatctatgatgcatccaatctagtttctgggatcccacccaggtttagtggcagtgggtctgggacagacttcaccctcaacatccatcctgtggagaaggtggatgctgcaacctatcactgtcagcaaagtactgaggatccgtggacgttcggtggagggaccaagctcgagatcaaatccggaggtggtggatccgacgtccaactggtgcagtcaggggctgaagtgaaaaaacctggggcctcagtgaaggtgtcctgcaaggcttctggctacacctttactaggtacacgatgcactgggtaaggcaggcacctggacagggtctggaatggattggatacattaatcctagccgtggttatactaattacaatcagaagttcaaggaccgcgtcacaatcactacagacaaatccaccagcacagcctacatggaactgagcagcctgcgttctgaggacactgcagtctattactgtgcaagatattatgatgatcattactgccttgactactggggccaaggcaccacggtcaccgtctcctcaggcgaaggtactagtactggttctggtggaagtggaggttcaggtggagcagacgacattgtactgacccagtctccagcaactctgtctctgtctccaggggagcgtgccaccctgagctgcagagccagtcaaagtgtaagttacatgaactggtaccagcagaagccgggcaaggcacccaaaagatggatttatgacacatccaaagtggcttctggagtccctgctcgcttcagtggcagtgggtctgggaccgactactctctcacaatcaacagcttggaggctgaagatgctgccacttattactgccaacagtggagtagtaacccgctcacgttcggtggcgggaccaaggtggagatcaaa

SEQ ID NO: 399 - protein, 499 aa, artificial sequence
  CD19xVH7VL2 HLHL
QVQLQQSGAELVRPGSSVKISCKASGYAFSSYWMNWVKQRPGQGLEWIGQIWPGDGDTNYNGKFKGKATLTADESSSTAYMQLSSLASEDSAVYFCARRETTTVGRYYYAMDYWGQGTTVTVSSGGGGSGGGGSGGGGSDIQLTQSPASLAVSLGQRATISCKASQSVDYDGDSYLNWYQQIPGQPPKLLIYDASNLVSGIPPRFSGSGSGTDFTLNIHPVEKVDAATYHCQQSTEDPWTFGGGTKLEIKSGGGGSDVQLVQSGAEVKKPGASVKVSCKASGYTFTRYTMHWVRQAPGQGLEWIGYINPSRGYTNYNQKFKDRVTITTDKSTSTAYMELSSLRSEDTAVYYCARYYDDHYCLDYWGQGTTVTVSSGEGTSTGSGGSGGSGGADDIVLTQSPATLSLSPGERATLSCRASQSVSYMNWYQQKPGKAPKRWIYDTSKVASGVPARFSGSGSGTDYSLTINSLEAEDAATYYCQQWSSNPLTFGGGTKVEIK

SEQ ID NO: 400 - DNA, 1494 bp, artificial sequence
  CD19xVL2VH7 LHLH
gatatccagctgacccagtctccagcttctttggctgtgtctctagggcagagggccaccatctcctgcaaggccagccaaagtgttgattatgatggtgatagttatttgaactggtaccaacagattccaggacagccacccaaactcctcatctatgatgcatccaatctagtttctgggatcccacccaggtttagtggcagtgggtctgggacagacttcaccctcaacatccatcctgtggagaaggtggatgctgcaacctatcactgtcagcaaagtactgaggatccgtggacgttcggtggagggaccaagctcgagatcaaaggtggtggtggttctggcggcggcggctccggtggtggtggttctcaggtgcagctgcagcagtctggggctgagctggtgaggcctgggtcctcagtgaagatttcctgcaaggcttctggctatgcattcagtagctactggatgaactgggtgaagcagaggcctggacagggtcttgagtggattggacagatttggcctggagatggtgatactaactacaatggaaagttcaagggtaaagccactctgactgcagacgaatcctccagcacagcctacatgcaactcagcagcctagcatctgaggactctgcggtctatttctgtgcaagacgggagactacgacggtaggccgttattactatgctatggactactggggccaagggaccacggtcaccgtctcctccggaggtggtggatccgacattgtactgacccagtctccagcaactctgtctctgtctccaggggagcgtgccaccctgagctgcagagccagtcaaagtgtaagttacatgaactggtaccagcagaagccgggcaaggcacccaaaagatggatttatgacacatccaaagtggcttctggagtccctgctcgcttcagtggcagtgggtctgggaccgactactctctcacaatcaacagcttggaggctgaagatgctgccacttattactgccaacagtggagtagtaacccgctcacgttcggtggcgggaccaaggtggagatcaaaggcgaaggtactagtactggttctggtggaagtggaggttcaggtggagcagacgacgtccaactggtgcagtcaggggctgaagtgaaaaaacctggggcctcagtgaaggtgtcctgcaaggcttctggctacacctttactaggtacacgatgcactgggtaaggcaggcacctggacagggtctggaatggattggatacattaatcctagccgtggttatactaattacaatcagaagttcaaggaccgcgtcacaatcactacagacaaatccaccagcacagcctacatggaactgagcagcctgcgttctgaggacactgcagtctattactgtgcaagatattatgatgatcattactgccttgactactggggccaaggcaccacggtcaccgtctcctca

SEQ ID NO: 401 - protein, 498 aa, artificial sequence
  CD19xVL2VH7 LHLH
DIQLTQSPASLAVSLGQRATISCKASQSVDYDGDSYLNWYQQIPGQPPKLLIYDASNLVSGIPPRFSGSGSGTDFTLNIHPVEKVDAATYHCQQSTEDPWTFGGGTKLEIKGGGGSGGGGSGGGGSQVQLQQSGAELVRPGSSVKISCKASGYAFSSYWMNWVKQRPGQGLEWIGQIWPGDGDTNYNGKFKGKATLTADESSSTAYMQLSSLASEDSAVYFCARRETTTVGRYYYAMDYWGQGTTVTVSSGGGGSDIVLTQSPATLSLSPGERATLSCRASQSVSYMNWYQQKPGKAPKRWIYDTSKVASGVPARFSGSGSGTDYSLTINSLEAEDAATYYCQQWSSNPLTFGGGTKVEIKGEGTSTGSGGSGGSGGADDVQLVQSGAEVKKPGASVKVSCKASGYTFTRYTMHWVRQAPGQGLEWIGYINPSRGYTNYNQKFKDRVTITTDKSTSTAYMELSSLRSEDTAVYYCARYYDDHYCLDYWGQGTTVTVSS

SEQ ID NO: 402 - DNA, 1497 bp, artificial sequence
  CD19xVL2VH7 HLLH
caggtgcagctgcagcagtctggggctgagctggtgaggcctgggtcctcagtgaagatttcctgcaaggcttctggctatgcattcagtagctactggatgaactgggtgaagcagaggcctggacagggtcttgagtggattggacagatttggcctggagatggtgatactaactacaatggaaagttcaagggtaaagccactctgactgcagacgaatcctccagcacagcctacatgcaactcagcagcctagcatctgaggactctgcggtctatttctgtgcaagacgggagactacgacggtaggccgttattactatgctatggactactggggccaagggaccacggtcaccgtctcctccggtggtggtggttctggcggcggcggctccggtggtggtggttctgatatccagctgacccagtctccagcttctttggctgtgtctctagggcagagggccaccatctcctgcaaggccagccaaagtgttgattatgatggtgatagttatttgaactggtaccaacagattccaggacagccacccaaactcctcatctatgatgcatccaatctagtttctgggatcccacccaggtttagtggcagtgggtctgggacagacttcaccctcaacatccatcctgtggagaaggtggatgctgcaacctatcactgtcagcaaagtactgaggatccgtggacgttcggtggagggaccaagctcgagatcaaatccggaggtggtggatccgacattgtactgacccagtctccagcaactctgtctctgtctccaggggagcgtgccaccctgagctgcagagccagtcaaagtgtaagttacatgaactggtaccagcagaagccgggcaaggcacccaaaagatggatttatgacacatccaaagtggcttctggagtccctgctcgcttcagtggcagtgggtctgggaccgactactctctcacaatcaacagcttggaggctgaagatgctgccacttattactgccaacagtggagtagtaacccgctcacgttcggtggcgggaccaaggtggagatcaaaggcgaaggtactagtactggttctggtggaagtggaggttcaggtggagcagacgacgtccaactggtgcagtcaggggctgaagtgaaaaaacctggggcctcagtgaaggtgtcctgcaaggcttctggctacacctttactaggtacacgatgcactgggtaaggcaggcacctggacagggtctggaatggattggatacattaatcctagccgtggttatactaattacaatcagaagttcaaggaccgcgtcacaatcactacagacaaatccaccagcacagcctacatggaactgagcagcctgcgttctgaggacactgcagtctattactgtgcaagatattatgatgatcattactgccttgactactggggccaaggcaccacggtcaccgtctcctca

SEQ ID NO: 403 - protein, 499 aa, artificial sequence
  CD19xVL2VH7 HLLH
QVQLQQSGAELVRPGSSVKISCKASGYAFSSYWMNWVKQRPGQGLEWIGQIWPGDGDTNYNGKFKGKATLTADESSSTAYMQLSSLASEDSAVYFCARRETTTVGRYYYAMDYWGQGTTVTVSSGGGGSGGGGSGGGGSDIQLTQSPASLAVSLGQRATISCKASQSVDYDGDSYLNWYQQIPGQPPKLLIYDASNLVSGIPPRFSGSGSGTDFTLNIHPVEKVDAATYHCQQSTEDPWTFGGGTKLEIKSGGGGSDIVLTQSPATLSLSPGERATLSCRASQSVSYMNWYQQKPGKAPKRWIYDTSKVASGVPARFSGSGSGTDYSLTINSLEAEDAATYYCQQWSSNPLTFGGGTKVEIKGEGTSTGSGGSGGSGGADDVQLVQSGAEVKKPGASVKVSCKASGYTFTRYTMHWVRQAPGQGLEWIGYINPSRGYTNYNQKFKDRVTITTDKSTSTAYMELSSLRSEDTAVYYCARYYDDHYCLDYWGQGTTVTVSS

SEQ ID NO: 404 - DNA, 1497 bp, artificial sequence
  CD19xVH7VL3 HLHL
caggtgcagctgcagcagtctggggctgagctggtgaggcctgggtcctcagtgaagatttcctgcaaggcttctggctatgcattcagtagctactggatgaactgggtgaagcagaggcctggacagggtcttgagtggattggacagatttggcctggagatggtgatactaactacaatggaaagttcaagggtaaagccactctgactgcagacgaatcctccagcacagcctacatgcaactcagcagcctagcatctgaggactctgcggtctatttctgtgcaagacgggagactacgacggtaggccgttattactatgctatggactactggggccaagggaccacggtcaccgtctcctccggtggtggtggttctggcggcggcggctccggtggtggtggttctgatatccagctgacccagtctccagcttctttggctgtgtctctagggcagagggccaccatctcctgcaaggccagccaaagtgttgattatgatggtgatagttatttgaactggtaccaacagattccaggacagccacccaaactcctcatctatgatgcatccaatctagtttctgggatcccacccaggtttagtggcagtgggtctgggacagacttcaccctcaacatccatcctgtggagaaggtggatgctgcaacctatcactgtcagcaaagtactgaggatccgtggacgttcggtggagggaccaagctcgagatcaaatccggaggtggtggatccgacgtccaactggtgcagtcaggggctgaagtgaaaaaacctggggcctcagtgaaggtgtcctgcaaggcttctggctacacctttactaggtacacgatgcactgggtaaggcaggcacctggacagggtctggaatggattggatacattaatcctagccgtggttatactaattacaatcagaagttcaaggaccgcgtcacaatcactacagacaaatccaccagcacagcctacatggaactgagcagcctgcgttctgaggacactgcagtctattactgtgcaagatattatgatgatcattactgccttgactactggggccaaggcaccacggtcaccgtctcctcaggcgaaggtactagtactggttctggtggaagtggaggttcaggtggagcagacgacattgtactgacccagtctccagcaactctgtctctgtctccaggggagcgtgccaccctgacctgcagagccagttcaagtgtaagttacatgaactggtaccagcagaagccgggcaaggcacccaaaagatggatttatgacacatccaaagtggcttctggagtccctgctcgcttcagtggcagtgggtctgggaccgactactctctcacaatcaacagcttggaggctgaagatgctgccacttattactgccaacagtggagtagtaacccgctcacgttcggtggcgggaccaaggtggagatcaaa

SEQ ID NO: 405 - protein, 499 aa, artificial sequence
  CD19xVH7VL3 HLHL
QVQLQQSGAELVRPGSSVKISCKASGYAFSSYWMNWVKQRPGQGLEWIGQIWPGDGDTNYNGKFKGKATLTADESSSTAYMQLSSLASEDSAVYFCARRETTTVGRYYYAMDYWGQGTTVTVSSGGGGSGGGGSGGGGSDIQLTQSPASLAVSLGQRATISCKASQSVDYDGDSYLNWYQQIPGQPPKLLIYDASNLVSGIPPRFSGSGSGTDFTLNIHPVEKVDAATYHCQQSTEDPWTFGGGTKLEIKSGGGGSDVQLVQSGAEVKKPGASVKVSCKASGYTFTRYTMHWVRQAPGQGLEWIGYINPSRGYTNYNQKFKDRVTITTDKSTSTAYMELSSLRSEDTAVYYCARYYDDHYCLDYWGQGTTVTVSSGEGTSTGSGGSGGSGGADDIVLTQSPATLSLSPGERATLTCRASSSVSYMNWYQQKPGKAPKRWIYDTSKVASGVPARFSGSGSGTDYSLTINSLEAEDAATYYCQQWSSNPLTFGGGTKVEIK

SEQ ID NO: 406 - DNA, 1494 bp, artificial sequence
  CD19xVL3VH7 LHLH
gatatccagctgacccagtctccagcttctttggctgtgtctctagggcagagggccaccatctcctgcaaggccagccaaagtgttgattatgatggtgatagttatttgaactggtaccaacagattccaggacagccacccaaactcctcatctatgatgcatccaatctagtttctgggatcccacccaggtttagtggcagtgggtctgggacagacttcaccctcaacatccatcctgtggagaaggtggatgctgcaacctatcactgtcagcaaagtactgaggatccgtggacgttcggtggagggaccaagctcgagatcaaaggtggtggtggttctggcggcggcggctccggtggtggtggttctcaggtgcagctgcagcagtctggggctgagctggtgaggcctgggtcctcagtgaagatttcctgcaaggcttctggctatgcattcagtagctactggatgaactgggtgaagcagaggcctggacagggtcttgagtggattggacagatttggcctggagatggtgatactaactacaatggaaagttcaagggtaaagccactctgactgcagacgaatcctccagcacagcctacatgcaactcagcagcctagcatctgaggactctgcggtctatttctgtgcaagacgggagactacgacggtaggccgttattactatgctatggactactggggccaagggaccacggtcaccgtctcctccggaggtggtggatccgacattgtactgacccagtctccagcaactctgtctctgtctccaggggagcgtgccaccctgacctgcagagccagttcaagtgtaagttacatgaactggtaccagcagaagccgggcaaggcacccaaaagatggatttatgacacatccaaagtggcttctggagtccctgctcgcttcagtggcagtgggtctgggaccgactactctctcacaatcaacagcttggaggctgaagatgctgccacttattactgccaacagtggagtagtaacccgctcacgttcggtggcgggaccaaggtggagatcaaaggcgaaggtactagtactggttctggtggaagtggaggttcaggtggagcagacgacgtccaactggtgcagtcaggggctgaagtgaaaaaacctggggcctcagtgaaggtgtcctgcaaggcttctggctacacctttactaggtacacgatgcactgggtaaggcaggcacctggacagggtctggaatggattggatacattaatcctagccgtggttatactaattacaatcagaagttcaaggaccgcgtcacaatcactacagacaaatccaccagcacagcctacatggaactgagcagcctgcgttctgaggacactgcagtctattactgtgcaagatattatgatgatcattactgccttgactactggggccaaggcaccacggtcaccgtctcctca

SEQ ID NO: 407 - protein, 498 aa, artificial sequence
  CD19xVL3VH7 LHLH
DIQLTQSPASLAVSLGQRATISCKASQSVDYDGDSYLNWYQQIPGQPPKLLIYDASNLVSGIPPRFSGSGSGTDFTLNIHPVEKVDAATYHCQQSTEDPWTFGGGTKLEIKGGGGSGGGGSGGGGSQVQLQQSGAELVRPGSSVKISCKASGYAFSSYWMNWVKQRPGQGLEWIGQIWPGDGDTNYNGKFKGKATLTADESSSTAYMQLSSLASEDSAVYFCARRETTTVGRYYYAMDYWGQGTTVTVSSGGGGSDIVLTQSPATLSLSPGERATLTCRASSSVSYMNWYQQKPGKAPKRWIYDTSKVASGVPARFSGSGSGTDYSLTINSLEAEDAATYYCQQWSSNPLTFGGGTKVEIKGEGTSTGSGGSGGSGGADDVQLVQSGAEVKKPGASVKVSCKASGYTFTRYTMHWVRQAPGQGLEWIGYINPSRGYTNYNQKFKDRVTITTDKSTSTAYMELSSLRSEDTAVYYCARYYDDHYCLDYWGQGTTVTVSS

SEQ ID NO: 408 - DNA, 1497 bp, artificial sequence
  CD19xVL3VH7 HLLH
caggtgcagctgcagcagtctggggctgagctggtgaggcctgggtcctcagtgaagatttcctgcaaggcttctggctatgcattcagtagctactggatgaactgggtgaagcagaggcctggacagggtcttgagtggattggacagatttggcctggagatggtgatactaactacaatggaaagttcaagggtaaagccactctgactgcagacgaatcctccagcacagcctacatgcaactcagcagcctagcatctgaggactctgcggtctatttctgtgcaagacgggagactacgacggtaggccgttattactatgctatggactactggggccaagggaccacggtcaccgtctcctccggtggtggtggttctggcggcggcggctccggtggtggtggttctgatatccagctgacccagtctccagcttctttggctgtgtctctagggcagagggccaccatctcctgcaaggccagccaaagtgttgattatgatggtgatagttatttgaactggtaccaacagattccaggacagccacccaaactcctcatctatgatgcatccaatctagtttctgggatcccacccaggtttagtggcagtgggtctgggacagacttcaccctcaacatccatcctgtggagaaggtggatgctgcaacctatcactgtcagcaaagtactgaggatccgtggacgttcggtggagggaccaagctcgagatcaaatccggaggtggtggatccgacattgtactgacccagtctccagcaactctgtctctgtctccaggggagcgtgccaccctgacctgcagagccagttcaagtgtaagttacatgaactggtaccagcagaagccgggcaaggcacccaaaagatggatttatgacacatccaaagtggcttctggagtccctgctcgcttcagtggcagtgggtctgggaccgactactctctcacaatcaacagcttggaggctgaagatgctgccacttattactgccaacagtggagtagtaacccgctcacgttcggtggcgggaccaaggtggagatcaaaggcgaaggtactagtactggttctggtggaagtggaggttcaggtggagcagacgacgtccaactggtgcagtcaggggctgaagtgaaaaaacctggggcctcagtgaaggtgtcctgcaaggcttctggctacacctttactaggtacacgatgcactgggtaaggcaggcacctggacagggtctggaatggattggatacattaatcctagccgtggttatactaattacaatcagaagttcaaggaccgcgtcacaatcactacagacaaatccaccagcacagcctacatggaactgagcagcctgcgttctgaggacactgcagtctattactgtgcaagatattatgatgatcattactgccttgactactggggccaaggcaccacggtcaccgtctcctca

SEQ ID NO: 409 - protein, 499 aa, artificial sequence
  CD19xVL3VH7 HLLH
QVQLQQSGAELVRPGSSVKISCKASGYAFSSYWMNWVKQRPGQGLEWIGQIWPGDGDTNYNGKFKGKATLTADESSSTAYMQLSSLASEDSAVYFCARRETTTVGRYYYAMDYWGQGTTVTVSSGGGGSGGGGSGGGGSDIQLTQSPASLAVSLGQRATISCKASQSVDYDGDSYLNWYQQIPGQPPKLLIYDASNLVSGIPPRFSGSGSGTDFTLNIHPVEKVDAATYHCQQSTEDPWTFGGGTKLEIKSGGGGSDIVLTQSPATLSLSPGERATLTCRASSSVSYMNWYQQKPGKAPKRWIYDTSKVASGVPARFSGSGSGTDYSLTINSLEAEDAATYYCQQWSSNPLTFGGGTKVEIKGEGTSTGSGGSGGSGGADDVQLVQSGAEVKKPGASVKVSCKASGYTFTRYTMHWVRQAPGQGLEWIGYINPSRGYTNYNQKFKDRVTITTDKSTSTAYMELSSLRSEDTAVYYCARYYDDHYCLDYWGQGTTVTVSS

1. A cytotoxically active CD3 specific binding construct comprising a first domain specifically binding to human CD3 and an Ig-derived second binding domain,
wherein said first domain is deimmunized and comprises a CDR-H1 region, a CDR-H2 region and a CDR-H3 region, said CDR-H3 region comprising an amino acid sequence as depicted in SEQ ID NO.: 96, 108, 119, 120, 121, 122, 123, 124, 125, 126, or 127; and
wherein said first domain further comprises in its framework H1 the sequence VKK and wherein the transition sequence between framework H1 and CDRH1 region comprises the sequence Ala-Ser-Gly-Tyr-Thr-Phe (ASGYTF; SEQ ID NO.: 233).

2. The cytotoxically active CD3 specific binding construct of claim 1 further comprising in said first domain a framework H3 comprising the sequence Met-Glu-Leu-Ser (MELS; SEQ ID NO.: 234).

3. The cytotoxically active CD3 specific binding construct of claim 1 further comprising in said first domain a framework H3 comprising the sequence Ile-Thr-Thr-Asp-Lys (ITTDK; SEQ ID NO.: 235).

4. The CD3 specific binding construct of claim 1, wherein said first domain which specifically binds to human CD3 comprises a framework H1 as shown in SEQ ID NO.: 152 or 153.

5. The CD3 specific binding construct of claim 1, wherein said first domain which specifically binds to human CD3 comprises a framework H2 as shown in SEQ ID NO.: 156 or 157.

6. The CD3 specific binding construct of claim 1, wherein said first domain which specifically binds to human CD3 comprises a framework H3 as shown in SEQ ID NO.: 160 or 161.

7. The CD3 specific binding construct of claim 1, wherein said first domain which specifically binds to human CD3 comprises a framework H4 as shown in SEQ ID NO.: 164 or 165.

8. The CD3 specific binding construct of claim 1, wherein said construct comprises
(a) a CDR-H1 as depicted in SEQ ID NO.: 88; and
(b) a CDR-H2 as depicted in SEQ ID NO.: 90 or 92.

9. The CD3 specific binding construct of claim 1, wherein said construct comprises a VH-region as depicted in SEQ ID NO.:74 or 76.

10. The CD3 specific binding construct of claim 1, wherein said construct comprises a CDR-L1 as depicted in SEQ ID NO.: 98 or 100.

11. The CD3 specific binding construct of claim 1, wherein said construct comprises a CDR-L2 as depicted in SEQ ID NO.:102.

12. The CD3 specific binding construct of claim 1, wherein said construct comprises a CDR-L3 as depicted in SEQ ID NO.:104.

13. The CD3 specific binding construct of claim 1, comprising a V_{L} region in its CD3-specific portion, wherein said VL region is selected from the group consisting of SEQ ID NO.: 78, SEQ ID NO.: 80, SEQ ID NO.: 82 and SEQ ID NO.: 112.

14. The CD3 specific binding construct of claim 1, wherein said Ig-derived second domain is a scFv.

15. The CD3 specific binding construct of claim 1, wherein said Ig-derived second domain and/or (a) connecting linker-region(s) is/are humanized and/or deimmunized.

16. The CD3 specific binding construct of claim 1, wherein said Ig-derived second domain comprises an antigen-interaction-site with specificity for a cell surface molecule.

17. The CD3 specific binding construct of claim 16, wherein said cell surface molecule is a tumor specific marker.

18. The CD3 specific binding construct of claim 16, wherein said Ig-derived second binding domain comprises an antigen-interaction site with a specificity for a molecule selected from the group consisting of EpCAM, CCR5, CD19, HER-2, HER-2 neu, HER-3, HER-4, EGFR, PSMA, CEA, MUC-1 (mucin), MUC2, MUC3, MUC4, MUC5_{AC}, MUC5_{B}, MUC7, phCG, Lewis-Y, CD20, CD33, CD30, ganglioside GD3,9-O-Acetyl-GD3, GM2, Globo H, fucosyl GM1, Poly SA, GD2, Carboanhydrase IX (MN/CA IX), CD44v6, Sonic Hedgehog (Shh), Wue-1, Plasma Cell Antigen, (membrane-bound) IgE, Melanoma Chondroitin Sulfate Proteoglycan (MCSP), CCR8, TNF-alpha precursor, STEAP, mesothelin, A33 Antigen, Prostate Stem Cell Antigen (PSCA), Ly-6; desmoglein 4, E-cadherin neo-epitope, Fetal Acetylcholine Receptor, CD25, CA19-9 marker, CA-125 marker and Muellerian Inhibitory Substance (MIS) Receptor type II, sTn (sialylated Tn antigen, TAG72), FAP (fibroblast activation antigen), endosialin, EGFRvIII, L6, SAS, CD63, TAG72, TF-antigen, Cora antigen, CD7, CD22, Igα, Igβ, G250, gp100, MT-MMPs, F19-antigen, CO-29 and EphA2.

19. The CD3 specific binding construct of claim 1, wherein said second Ig-derived binding domain comprises an antigen-interaction site with a specificity for EpCAM.

20. The CD3 specific binding construct of claim 19, wherein said CD3-specific binding construct comprises an amino acid sequence selected from the group of
(a) an amino acid sequence as shown in any one of SEQ ID NO.: 31, 33, 35, 37, 39, 49, 55, 58, 61, 63, 65, 67, 237, 239, 241, 243, 245, 247, 249, 251, 253, 255, 257, 259, 261, 263, 265, 267, 269, 271, 273, 275, 277, 279, 281, 283, 285, 287, 289, 291, 293, 295, 297, 299, 301, 303, 305, 307, 309, 311, 313, 315, 317, 319, 321, 323 and 325;
(b) an amino acid sequence encoded by a nucleic acid sequence as shown in any one of SEQ ID NO.: 30, 32, 34, 36, 38, 48, 54, 57, 60, 62, 64, 66, 236, 238, 240, 242, 244, 246, 248, 250, 252, 254, 256, 258, 260, 262, 264, 266, 268, 270, 272, 274, 276, 278, 280, 282, 284, 286, 288, 290, 292, 294, 296, 298, 300, 302, 304, 306, 308, 310, 312, 314, 316, 318, 320, 322 and 324; and
(c) an amino acid sequence encoded by a nucleic acid sequence which is degenerate as a result of the genetic code to a nucleotide sequence of (b);
(d) and amino acid sequence encoded by a nucleic acid sequence hybridising with the complementary strand of a nucleic acid sequence as defined in (b) under stringent hybridisation conditions.

21. The CD3 specific binding construct of claim 1, wherein said Ig-derived second binding domain comprises an antigen-interaction site with a specificity CCR5.

22. The CD3 specific binding construct of claim 21, wherein said CD3-specific binding construct comprises an amino acid sequence selected from the group of
(a) an amino acid sequence as shown in any one of SEQ ID NO.: 206, 208, 210, 212, 214 or 216;
(b) an amino acid sequence encoded by a nucleic acid sequence as shown in any one of in SEQ ID NO.: 205, 207, 209, 211, 213 or 215; and
(c) an amino acid sequence encoded by a nucleic acid sequence which is degenerate as a result of the genetic code to a nucleotide sequence of (b);
(d) and amino acid sequence encoded by a nucleic acid sequence hybridising with the complementary strand of a nucleic acid sequence as defined in (b) under stringent hybridisation conditions.

23. The CD3 specific binding construct of claim 1, wherein said Ig-derived second binding domain comprises an antigen-interaction site with a specificity for CD19.

24. The CD3 specific binding construct of claim 23, wherein said CD3-specific binding construct comprises an amino acid sequence selected from the group of
(a) an amino acid sequence as shown in any one of SEQ ID NO.: 190, 192, 194, 196, 198, 200, 327, 329, 331, 333, 335, 337, 339, 341, 343, 345, 347, 349, 351, 353, 357, 359, 361, 363, 365, 367, 369, 371, 373, 375, 377, 379, 381, 383, 385, 387, 389, 391, 393, 395, 397, 399, 401, 403, 405, 407 or 409;
(b) an amino acid sequence encoded by a nucleic acid sequence as shown in any one of in SEQ ID NO.: 189, 191, 193, 195, 197, 199, 326, 328, 330, 332, 334, 336, 338, 340, 342, 344, 346, 348, 350, 352, 354, 356, 358, 360, 362, 364, 366, 368, 370, 372, 374, 376, 378, 380, 382, 384, 386, 388, 390, 392, 394, 396, 398, 400, 402, 404, 406 or 408; and
(c) an amino acid sequence encoded by a nucleic acid sequence which is degenerate as a result of the genetic code to a nucleotide sequence of (b);
(d) and amino acid sequence encoded by a nucleic acid sequence hybridising with the complementary strand of a nucleic acid sequence as defined in (b) under stringent hybridisation conditions.

25. The CD3 specific binding construct of claim 1, wherein said Ig-derived second binding domain comprises an antigen-interaction site with a specificity for CD20.

26. The CD3 specific binding construct of claim 25, wherein said CD3-specific binding construct comprises an amino acid sequence selected from the group of
(a) an amino acid sequence as shown in any one of SEQ ID NO.: 218, 220, 222, 224, 226, or 228;
(b) an amino acid sequence encoded by a nucleic acid sequence as shown in any one of in SEQ ID NO.: 217, 219, 221, 223, 225 or 227; and
(c) an amino acid sequence encoded by a nucleic acid sequence which is degenerate as a result of the genetic code to a nucleotide sequence of (b);
(d) and amino acid sequence encoded by a nucleic acid sequence hybridising with the complementary strand of a nucleic acid sequence as defined in (b) under stringent hybridisation conditions.

27. A nucleic acid sequence encoding a CD3 specific binding construct of claim 1.

28. A vector comprising a nucleic acid sequence of claim 27.

29. A vector comprising a nucleic acid sequence of claim 27, which further comprises a nucleic acid sequence which is a regulatory sequence operable linked to said nucleic acid sequence according to claim 27.

30. The vector of claim 28, wherein the vector is an expression vector.

31. A host transformed or transfected with the vector of claim 28.

32. A process for the production of a CD3 specific binding construct of claim 1, said process comprising
culturing a host transformed or transfected with a vector comprising a nucleic acid sequence encoding a CD3 specific binding construct of claim 1 under conditions allowing the expression of the polypeptide construct and recovering the produced polypeptide construct from the culture.

33. A composition comprising
a) a CD3 specific binding construct of claim 1, or
b) a nucleic acid molecule encoding a CD3 specific binding construct of claim 1, or
c) a vector comprising a nucleic acid sequence encoding a CD3 specific binding construct of claim 1, or
d) a host transformed or transfected with a vector comprising a nucleic acid sequence encoding a CD3 specific binding construct of claim 1,
and,
optionally, a proteinaceous compound capable of providing an activation signal for immune effector cells.

34. The composition of claim 33, which is a pharmaceutical composition further comprising, optionally, suitable formulations of carrier, stabilizers and/or excipients.

35. The composition of claim 33, which is a diagnostic composition further comprising, optionally, means and methods for detection.

36. (canceled)

37. A method for the prevention, treatment or amelioration of a proliferative disease, a tumorous disease, an inflammatory disease, an immunological disorder, an autoimmune disease, an infectious disease, viral disease, allergic reactions, parasitic reactions, graft-versus-host diseases or host-versus-graft diseases comprising the administration of a CD3 specific binding construct of claim 1, a nucleic acid molecule encoding a CD3 specific binding construct of claim 1, a vector comprising a nucleic acid sequence encoding a CD3 specific binding construct of claim 1, or a host transformed or transfected with a vector comprising a nucleic acid sequence encoding a CD3 specific binding construct of claim 1 to a subject in need of such a prevention, treatment or amelioration.

38. The method of claim 37, wherein said subject is a human.

39. The method of claim 37, further comprising, the administration of a proteinaceous compound capable of providing an activation signal for immune effector cells.

40. The method of claim 39, wherein said proteinaceous compound is administered simultaneously or non-simultaneously with the CD3 specific binding construct the nucleic acid molecule, the vector or the host of.

41. A kit comprising a CD3 specific binding construct of claim 1, a nucleic acid molecule encoding a CD3 specific binding construct of claim 1, a vector comprising a nucleic acid sequence encoding a CD3 specific binding construct of claim 1, or a host transformed or transfected with a vector comprising a nucleic acid sequence encoding a CD3 specific binding construct of claim 1.
